(19) United States
(12) Patent Application Publication
(10) Pub. No.: US 2026/0022344 A1
(43) Pub. Date: Jan. 22, 2026

(54) SYSTEMS FOR CELL PROGRAMMING TOWARDS PANCREATIC LINEAGE AND METHODS THEREOF

(71) Applicant: Syntax Bio, Inc., Chicago, IL (US)

(72) Inventors: Ryan CLARKE, Chicago, IL (US); Bradley J. MERRILL, Oak Park, IL (US)

(21) Appl. No.: 19/285,561

(22) Filed: Jul. 30, 2025

Related U.S. Application Data
(63) Continuation of application No. PCT/US24/14102, filed on Feb. 1, 2024.
(60) Provisional application No. 63/442,612, filed on Feb. 1, 2023.

(51) Int. Cl. C12N 5/071; C12N 15/85

(52) U.S. Cl. CPC C12N 5/0676; C12N 15/85; C12N 2506/45; C12N 2510/00

(57) ABSTRACT

Provided herein are systems of modulating gene expression, methods of use thereof, and cells engineered thereof for the purpose of differentiating cells, for example beta cells.

### CROSS-REFERENCE

[0001] This application is a continuation of International PCT Application No. PCT/US24/14102, filed Feb. 1, 2024, which claims the benefit of U.S. Provisional Patent Application No. 63/442,612, filed on Feb. 1, 2023, each of which is incorporated herein by reference in its entirety.

### SEQUENCE LISTING

[0002] The instant application contains a Sequence Listing which has been submitted electronically in XML file format and is hereby incorporated by reference in its entirety. Said XML copy, created on Jul. 30, 2025, is named 61684-711_301_SL.xml and is 2,080,768 bytes in size.

### BACKGROUND

[0003] Heterologous proteins and/or nucleic acid molecules can be utilized to elicit a desired response in a cell. The heterologous proteins and/or nucleic acid molecules can regulate genes of interest (e.g., transgenes and/or endogenous genes) to program (e.g., differentiate, de-differentiate) a cell. In some cases, endonuclease-based technologies (e.g., clustered regularly interspaced short palindromic repeats (CRISPR)-associated protein or “CRISPR/Cas”) have been adopted for manipulation of polynucleotide sequences, epigenetic modification thereof, and/or expression level thereof. For example, the CRISPR/Cas technology can be characterized by its versatility and facile programmability and can be used to promote genome editing across different species and cell types.

### SUMMARY

[0004] The present disclosure provides methods and systems for programming a cell, e.g., to elicit a desired response in the cell. Systems and methods of the present disclosure can promote conversion of a cell from one type to another. Systems and methods of the present disclosure can utilize a genetic circuit to control a cascade of a plurality of desired expression and/or activity profiles of a plurality of genes in the cell to affect this conversion. Systems and methods of the present disclosure can utilize heterologous proteins and/or nucleic acid molecules as building blocks of such genetic circuit.

[0005] In some embodiments, the present disclosure provides a method for conversion of a plurality of stem cells into a plurality of pancreatic lineage cells, the method comprising: contacting the plurality of stem cells with a heterologous genetic circuit comprising a plurality of gate units, wherein the heterologous genetic circuit is activatable to induce the plurality of gate units to modulate expression levels of a plurality of distinct target genes in a sequential manner to effect the conversion, wherein the plurality of gate units comprises: (a) a first gate unit that is preconfigured to modulate expression level of a first target gene of the plurality of distinct target genes, wherein the first target gene comprises one or more members selected from the group consisting of a forkhead box (FOX), a SRY-related HMG-box (SOX), and a GATA; and (b) a second gate unit that is preconfigured to modulate expression level of a second target gene of the plurality of distinct target genes, such that the expression levels of the first target gene and the second target gene are modulated in the sequential manner, wherein, upon activation of the heterologous genetic circuit, the plurality of gate units operates to effect the conversion.

[0006] In some embodiments, the present disclosure provides a method for conversion of a plurality of stem cells into a plurality of pancreatic lineage cells, via modulation of expression levels of a plurality of distinct target genes comprising a first target gene and a second target gene, the method comprising: (a) contacting a first polynucleotide sequence in the plurality of stem cells by a first heterologous gene regulating moiety to modulate expression level of the first target gene that is operatively coupled to the first polynucleotide sequence, wherein the first target gene comprises one or more members selected from the group consisting of a forkhead box (FOX), a SRY-related HMG-box (SOX), and a GATA; and (b) contacting a second polynucleotide sequence in the plurality of stem cells by a second heterologous gene regulating moiety, to modulate expression level of the second target gene that is operatively coupled to the second polynucleotide sequence, wherein the second target gene comprises one or more members selected from the group consisting of a basic helix-loop-helix transcription factor (bHLH), a homeobox, and a Maf transcription factor.

[0007] In some embodiments, the present disclosure provides a method for conversion of a plurality of stem cells into a plurality of pancreatic lineage cells, via modulation of expression levels of a plurality of distinct target genes comprising a first target gene and a second target gene, the method comprising: (a) contacting a first polynucleotide sequence in the plurality of stem cells by a first heterologous gene regulating moiety to modulate expression level of the first target gene that is operatively coupled to the first polynucleotide sequence, wherein the first target gene comprises one or more members selected from the group consisting of a forkhead box (FOX), a SRY-related HMG-box (SOX), a GATA, a basic helix-loop-helix transcription factor (bHLH), a homeobox, and a Maf transcription factor; and (b) contacting a second polynucleotide sequence in the plurality of stem cells by a second heterologous gene regulating moiety, to reduce expression level of the second target gene that is operatively coupled to the second polynucleotide sequence, wherein the second target gene comprises one or more members selected from the group consisting of an additional SOX, an additional homeobox, and a ETS transcription factor.

[0008] In some embodiments, the present disclosure provides a method for conversion of a plurality of stem cells towards pancreatic lineage, the method comprising: contacting a polynucleotide sequence in the plurality of stem cells by a heterologous gene regulating moiety to modulate expression level of a target gene that is operatively coupled to the polynucleotide sequence, wherein, within less than or equal to about 2 weeks following the contacting, a conversion rate from the plurality of stem cells to a plurality of pancreatic lineage cells is characterized to be at least about 5%.

[0009] In some embodiments, the present disclosure provides a method for treating a subject in need thereof, the method comprising: administering a plurality of pancreatic lineage cells to the subject, wherein the plurality of pancreatic lineage cells is prepared by subjecting a plurality of stem cells to ex vivo differentiation, wherein, within less than or equal to about 2 weeks of the ex vivo differentiation, a conversion rate from the plurality of stem cells to the plurality of pancreatic lineage cells is characterized to be at least about 5%.

[0010] In some embodiments, the present disclosure provides a system for conversion of a plurality of stem cells into a plurality of pancreatic lineage cells, the system comprising: a heterologous genetic circuit comprising a plurality of gate units, wherein the heterologous genetic circuit is activatable to induce the plurality of gate units to modulate expression levels of a plurality of distinct target genes in a sequential manner to effect the conversion, wherein the plurality of gate units comprises: (i) a first gate unit that is preconfigured to modulate expression level of a first target gene of the plurality of distinct target genes, wherein the first target gene comprises one or more members selected from the group consisting of a forkhead box (FOX), a SRY-related HMG-box (SOX), and a GATA; and (ii) a second gate unit that is preconfigured to modulate expression level of a second target gene of the plurality of distinct target genes, such that the expression levels of the first target gene and the second target gene are modulated in the sequential manner, wherein, upon activation of the heterologous genetic circuit, the plurality of gate units operates to effect the conversion.

[0011] In some embodiments, the present disclosure provides a system for conversion of a plurality of stem cells into a plurality of pancreatic lineage cells, via modulation of expression levels of a plurality of distinct target genes comprising a first target gene and a second target gene, the system comprising: (a) a first heterologous gene regulating moiety configured to bind a first polynucleotide sequence in the plurality of stem cells to modulate expression level of the first target gene that is operatively coupled to the first polynucleotide sequence, wherein the first target gene comprises one or more members selected from the group consisting of a forkhead box (FOX), a SRY-related HMG-box (SOX), and a GATA; and (b) a second heterologous gene regulating moiety configured to bind a second polynucleotide sequence in the plurality of stem cells to modulate expression level of the second target gene that is operatively coupled to the second polynucleotide sequence, wherein the second target gene comprises one or more members selected from the group consisting of a basic helix-loop-helix transcription factor (bHLH), a homeobox, and a Maf transcription factor.

[0012] In some embodiments, the present disclosure provides a system for conversion of a plurality of stem cells into a plurality of pancreatic lineage cells, via modulation of expression levels of a plurality of distinct target genes comprising a first target gene and a second target gene, the system comprising: (a) a first heterologous gene regulating moiety configured to bind a first polynucleotide sequence in the plurality of stem cells to modulate expression level of the first target gene that is operatively coupled to the first polynucleotide sequence, wherein the first target gene comprises one or more members selected from the group consisting of a forkhead box (FOX), a SRY-related HMG-box (SOX), a GATA, a basic helix-loop-helix transcription factor (bHLH), a homeobox, and a Maf transcription factor; and (b) a second heterologous gene regulating moiety configured to bind a second polynucleotide sequence in the plurality of stem cells to reduce expression level of the second target gene that is operatively coupled to the second polynucleotide sequence, wherein the second target gene comprises one or more members selected from the group consisting of an additional SOX, an additional homeobox, and a EST transcription factor.

[0013] In some embodiments, the present disclosure provides a system for conversion of a plurality of stem cells towards pancreatic lineage, the system comprising: a heterologous gene regulating moiety configured to bind a polynucleotide sequence in the plurality of stem cells to modulate expression level of a target gene that is operatively coupled to the polynucleotide sequence, wherein, within less than or equal to about 2 weeks following the contacting, a conversion rate from the plurality of stem cells to a plurality of pancreatic lineage cells is characterized to be at least about 5%.

[0014] In some embodiments, the present disclosure provides a composition for treating a subject in need thereof, the composition comprising: a plurality of pancreatic lineage cells prepared by subjecting a plurality of stem cells to ex vivo differentiation, wherein, within less than or equal to about 2 weeks of the ex vivo differentiation, a conversion rate from the plurality of stem cells to the plurality of pancreatic lineage cells is characterized to be at least about 5%.

### INCORPORATION BY REFERENCE

[0015] All publications, patents, and patent applications mentioned in this specification are herein incorporated by reference to the same extent as if each individual publication, patent, or patent application was specifically and individually indicated to be incorporated by reference. To the extent publications and patents or patent applications incorporated by reference contradict the disclosure contained in the specification, the specification is intended to supersede and/or take precedence over any such contradictory material.

### BRIEF DESCRIPTION OF THE DRAWINGS

[0016] The novel features of the invention are set forth with particularity in the appended claims. A better understanding of the features and advantages of the present invention will be obtained by reference to the following detailed description that sets forth illustrative embodiments, in which the principles of the invention are utilized, and the accompanying drawings (also “Figure” and “FIG.” herein), of which:

[0017] FIG. 1 is a schematic of the heterologous genetic circuit. An activating moiety initiates the circuit and can activate a gate unit. A gate unit is comprised of a gate moiety and/or a gene regulating moiety.

[0018] FIG. 2 depicts the developmental progression from an iPSC to a mature beta cell, including genes known to affect beta cell development at different stages and markers for screening associated expression patterns.

[0019] FIG. 3 depicts exemplary heterologous genetic circuits.

[0020] FIGS. 4A-4D shows scatter plots (e.g., volcano plots) to identify one or more heterologous genetic circuits that induced the stem cell to beta cell conversion under conditions such as no serum+B27+T3+betacellulin+ALK5i (FIG. 4A); serum+B27+T3+betacellulin+ALK5i (FIG. 4B); serum alone (FIG. 4C); and serum+ALK5i (FIG. 4D). The x axis is log 2 fold change of enrichment over core cascade and the y axis is p-value, with the dashed line showing pval=0.05.

[0021] FIG. 5 shows a scatter plot to identify one or more heterologous genetic circuits that induced the stem cell to beta cell conversion after five days.

[0022] FIG. 6 shows that top performing heterologous genetic circuits upregulate key surface markers across conditions.

[0023] FIG. 7 shows that heterologous genetic circuits #9 and #16 (Cellgorithm 9 and Cellgorithm 16, respectively) produce cultures with islet-like morphology after eight days in culture. Arrows point to islet cells.

[0024] FIG. 8A shows that top performing heterologous genetic circuits generate insulin positive cells after eight days in culture. FIG. 8B shows the percent of insulin positive cells for each heterologous genetic circuit tested.

[0025] FIG. 9 shows a comparison between directed differentiation and heterologous genetic circuits in the creation of beta cells.

### DETAILED DESCRIPTION

[0026] While various embodiments of the invention have been shown and described herein, it will be obvious to those skilled in the art that such embodiments are provided by way of example only. Numerous variations, changes, and substitutions may occur to those skilled in the art without departing from the invention. It should be understood that various alternatives to the embodiments of the invention described herein may be employed.

[0027] Whenever the term “at least,” “greater than,” or “greater than or equal to” precedes the first numerical value in a series of two or more numerical values, the term “at least,” “greater than” or “greater than or equal to” applies to each of the numerical values in that series of numerical values. For example, greater than or equal to 1, 2, or 3 is equivalent to greater than or equal to 1, greater than or equal to 2, or greater than or equal to 3.

[0028] Whenever the term “at most,” “up to,” “no more than,” “less than,” or “less than or equal to” precedes the first numerical value in a series of two or more numerical values, the term “at most,” “up to,” “no more than,” “less than,” or “less than or equal to” applies to each of the numerical values in that series of numerical values. For example, less than or equal to 3, 2, or 1 is equivalent to less than or equal to 3, less than or equal to 2, or less than or equal to 1.

[0029] As used in the specification and claims, the singular forms “a,” “an,” and “the” include plural references unless the context clearly dictates otherwise. For example, the term “a gate unit” includes a plurality of gate units.

[0030] The term “about” or “approximately” generally mean within an acceptable error range for the particular value as determined by one of ordinary skill in the art, which will depend in part on how the value is measured or determined, i.e., the limitations of the measurement system. For example, “about” can mean within 1 or more than 1 standard deviation, per the practice in the art. Alternatively, “about” can mean a range of up to 20%, up to 10%, up to 5%, or up to 1% of a given value. Alternatively, particularly with respect to biological systems or processes, the term can mean within an order of magnitude, preferably within 5-fold, and more preferably within 2-fold, of a value. Where particular values are described in the application and claims, unless otherwise stated, the term “about” meaning within an acceptable error range for the particular value should be assumed.

[0031] The use of the alternative (e.g., “or”) should be understood to mean either one, both, or any combination thereof of the alternatives. The term “and/or” should be understood to mean either one, or both of the alternatives.

[0032] The term “guide nucleic acid,” “guide nucleic acid molecule,” and “gNA” as used interchangeably herein, generally refer to 1) a guide sequence that can hybridize to a target sequence or 2) a scaffold sequence that can interact with or complex with a nucleic acid guide nuclease. A guide nucleic acid can be a single-guide nucleic acid (e.g., sgRNA) or a double-guide nucleic acid (e.g., dgRNA). sgRNA can be a single RNA molecule that contains both a scaffold tracrRNA and a crRNA which can be complementary to the target sequence. Alternatively, dgRNA can be a single RNA molecule that contains a crRNA annealed to a tracrRNA through a direct repeat sequence.

[0033] The term “genetic circuit,” “biological circuit,” or “circuit,” as used interchangeably herein, generally refers to a collection of molecular components (e.g., biological materials, such as polypeptides and/or polynucleotides, non-biological materials, etc.) operatively coupled (e.g., operating simultaneously, sequentially, etc.) accordingly to a circuit design. The collection of the molecular components can be capable of providing one or more specific outputs in a cell (e.g., regulation of one or more genes) in response to one or more inputs (e.g., a single input or a plurality of inputs). Such one or more inputs can be sufficient to trigger the molecular components of the genetic circuit to provide the one or more specific outputs. For example, the genetic circuit can comprise one or more molecular switches that are activatable by one or more inputs (FIG. 1).

[0034] A genetic circuit can be a controllable gene expression system comprising an assembly of biological parts that work together (e.g., simultaneously, sequentially, etc.) as a logical function. A genetic circuit can comprise a plurality of gate units, wherein at least one gate unit of the plurality of gate units is activatable by an activating moiety (e.g., a heterologous input to the cell) to activate other gate units of the plurality of gate units (e.g., simultaneously at once, sequentially in a cascading manner, etc.) (FIG. 1). For example, at least one gate unit of the plurality of gate units can be activatable (e.g., directly or indirectly) by another gate unit of the plurality of gate units, to (i) regulate expression or activity level of one or more target genes, (ii) activate at least one another gate unit of the plurality of gate units, and/or (ii) deactivate at least one another gate unit of the plurality of gate units, thereby collectively regulating expression and/or activity level of one or more target genes in a desired manner, as predetermined by the design of the genetic circuit (FIG. 1). The terms “heterologous genetic circuit,” “HGC,” “genetic circuit,” “cellular algorithm,” or “cellgorithm” as used herein may be used interchangeably.

[0035] The term “gate unit,” as referred to herein, generally refers to a portion of the genetic circuit that can control gene regulation by functioning similarly to a logic gate wherein it can control the flow of information and allow the circuit to multiplex decision making at different points. More specifically, the term refers to a nucleic acid encoding a genetic switch and a transcription/translation regulatory region, or series of regions, which the genetic switch acts on. The input for a gate unit can be an activating moiety and/or another gate unit. The output for a gate unit can be to activate another gate unit, to de-activate another gate unit, to affect a target gene, and/or a combination of any of the above. For example, a gate unit can be comprised of a plurality of gate moieties and/or a plurality of gene regulating moieties (FIG. 1).

[0036] The term “activating moiety,” as referred to herein, generally refers to a moiety that can activate plurality of genetic circuits and/or a plurality of gate units. An activating moiety can be a heterologous input to a cell. In some cases, activating moieties can include, but are not limited to, a guide nucleic acid molecule (e.g., a gRNA) or other nucleic acid, polypeptides, polynucleotides, small molecules, light, or a combination thereof.

[0037] For example, an activating moiety can be a guide nucleic acid molecule that forms a complex with an endonuclease (e.g., a Cas protein) to bind to a polynucleotide sequence of a gate moiety (e.g., a plasmid encoding another guide nucleic acid molecule) that is inactivated, to activate such gate moiety (e.g., induce expression of a functional form of the additional guide nucleic acid molecule) that can target one or more gene regulating moieties. The term “gate moiety,” as referred to herein, generally refers to a moiety that can affect the function of a gene regulating moiety within a gate unit. A gate moiety can activate and/or deactivate a gene regulating moiety. For example, a gate moiety can regulate expression of a gene regulation moiety by editing a nucleic acid sequence and thereby activating or deactivating the gene regulating moiety. For example, a gate moiety can be a guide nucleic acid molecule that forms a complex with an endonuclease (e.g., a Cas protein) to bind to a polynucleotide sequence of a gene regulating moiety (e.g., a plasmid encoding another guide nucleic acid molecule) to activate the gene regulating moiety (e.g., induce expression of a functional form of the another guide nucleic acid molecule) that can target one or more endogenous genes of a cell. Alternatively or in addition to, a gate moiety can activate and/or deactivate another gate unit of the genetic circuit (FIG. 1). For example, a gate moiety can be a guide nucleic acid molecule that forms a complex with an endonuclease (e.g., a Cas protein) to bind to a polynucleotide sequence of another gate moiety (e.g., a plasmid encoding another guide nucleic acid molecule) that is inactivated, to activate the another gate moiety (e.g., induce expression of a functional form of the another guide nucleic acid molecule). In another example, a gate moiety can be a guide nucleic acid molecule that forms a complex with an endonuclease (e.g., a Cas protein) to bind to a polynucleotide sequence of another gate moiety (e.g., a plasmid encoding another guide nucleic acid molecule) that is activated, to inactivate the another gate moiety (e.g., reduce expression of a functional form of the another guide nucleic acid molecule).

[0038] The term “gate moiety,” as referred to herein, generally refers to a moiety that can affect the function of a gene regulating moiety within a gate unit. A gate moiety can activate and/or deactivate a gene regulating moiety. For example, a gate moiety can regulate expression of a gene regulation moiety by editing a nucleic acid sequence and thereby activating or deactivating the gene regulating moiety. Alternatively or in addition to, a gate moiety can activate and/or deactivate another gate unit of the genetic circuit (FIG. 1).

[0039] The term “gene regulating moiety” or “gene editing moiety” as used interchangeably herein, generally refers to a moiety which can regulate the expression and or activity profile of a nucleic acid sequence or protein, whether exogenous or endogenous to a cell (FIG. 1). For example, a gene editing moiety can regulate expression of a gene by editing a nucleic acid sequence (e.g. CRISPR-Cas, Zinc-finger nucleases, TALENs, or siRNA). In some cases, a gene editing moiety can regulate expression of a gene by editing a genomic DNA sequence. In some cases, a gene editing moiety can regulate expression of a gene by editing an mRNA template. Editing a nucleic acid sequence can, in some cases, alter the underlying template for gene expression (e.g. CRISPR-Cas-inspired RNA targeting systems). Alternatively, a gene editing moiety can repress translation of a gene (e.g. Cas13).

[0040] Alternatively or in addition to, a gene editing moiety can be capable of regulating expression or activity of a gene by specifically binding to a target sequence operatively coupled to the gene (or a target sequence within the gene), and regulating the production of mRNA from DNA, such as chromosomal DNA or cDNA. For example, a gene editing moiety can recruit or comprise at least one transcription factor that binds to a specific DNA sequence, thereby controlling the rate of transcription of genetic information from DNA to mRNA. A gene editing moiety can itself bind to DNA and regulate transcription by physical obstruction, for example preventing proteins such as RNA polymerase and other associated proteins from assembling on a DNA template. A gene editing moiety can regulate expression of a gene at the translation level, for example, by regulating the production of protein from mRNA template. In some cases, a gene editing moiety can regulate gene expression by affecting the stability of an mRNA transcript. In some cases, a gene editing moiety can regulate a gene through epigenetic editing (e.g. Cas12).

[0041] In some cases, a plasmid can encode a non-functional form of a gene editing moiety. The plasmid can be activated (e.g., genetically modified) to express a functional form of the gene editing moiety, e.g., via activation of a functional gate moiety. For example, the plasmid can encode a non-functional form of a guide nucleic acid molecule that would otherwise be able to bind to a target gene of a cell. Upon binding of a functional gate moiety (e.g., another guide nucleic acid molecule complexed with a Cas protein) to the plasmid, the plasmid can be edited (e.g., cleaved at one or more sites, then repaired via endogenous mechanisms (e.g., homologous recombination, nonhomologous end joining) to allow expression of a functional form of the gene editing moiety (e.g., a functional form of the guide nucleic acid molecule with specific binding to the target gene of the cell), to permit modulation of the target gene in the cell.

[0042] In some cases, a gene regulating moiety can comprise a nucleic acid molecule (e.g., a guide nucleic acid molecule that forms a complex with an endonuclease, such as a Cas protein). Alternatively or in addition to, a gene regulating moiety can comprise or be operatively coupled to an endonuclease. An endonuclease can be an enzyme that cleaves a phosphodiester bond within a polynucleotide chain. An endonuclease can comprise restriction endonucleases that cleave DNA at specific sites without damaging bases. Restriction endonucleases can include Type I, Type II, Type III, and Type IV endonucleases, which can further include subtypes. In some cases, an endonuclease can be Cas1, Cas2, Cas 3, Cas4, Cas5, Cas6, Cas7, Cas8a, Cas8b, Cas8c, Cas9, Cas10, Cas10d, Cas12, Cas12a (Cpf1), Cas12b (C2c1), Cas12c (C2c3), Cas12d (CasY), Cas12e (CasX), Cas12f (Cas14 or C2c10), Cas12g, Cas12h, Cas12i, Cas12k (C2c5), Cas 13 (C2c2), Cas13b, Cas13c, Cas13d, Cas13x.1, Cse1, Cse2, Csy1, Csy2, Csy3, Csm2, Cmr5, Csx10, Csx11, Csf1, Csn2. An endonuclease can be a dead endonuclease which exhibits reduced cleavage activity. For example, an endonuclease can be a nuclease inactivated Cas such as a dCas (e.g., dCas9).

[0043] The abovementioned Cas proteins can form a complex with a guide nucleic acid (gNA (e.g., a guide RNA (gRNA)) and utilize the gNA to specifically bind to a target polynucleotide sequence (e.g., a target DNA sequence, a target RNA sequence). Accordingly, in some cases, such Cas proteins may be referred to as a “NA-guided nuclease” (e.g., RNA-guided nuclease). As used herein, the term “guide nucleic acid” (gNA) can generally refer to a nucleic acid that may hybridize to another nucleic acid. A guide nucleic acid may be RNA. A guide nucleic acid may be DNA. The guide nucleic acid may be programmed to bind to a sequence of nucleic acid site-specifically. The nucleic acid to be targeted, or the target nucleic acid, may comprise nucleotides. The guide nucleic acid may comprise nucleotides. A portion of the target nucleic acid may be complementary to a portion of the guide nucleic acid. The strand of a double-stranded target polynucleotide that is complementary to and hybridizes with the guide nucleic acid may be called the complementary strand. The strand of the double-stranded target polynucleotide that is complementary to the complementary strand, and therefore may not be complementary to the guide nucleic acid may be called noncomplementary strand. A guide nucleic acid may comprise a polynucleotide chain and can be called a “single guide nucleic acid.” A guide nucleic acid may comprise two polynucleotide chains and may be called a “double guide nucleic acid.” If not otherwise specified, the term “guide nucleic acid” may be inclusive, referring to both single guide nucleic acids and double guide nucleic acids. A guide nucleic acid may comprise a segment that can be referred to as a “nucleic acid-targeting segment” or a “nucleic acid-targeting sequence” or “spacer sequence”. A nucleic acid-targeting segment may comprise a sub-segment that may be referred to as a “protein binding segment” or “protein binding sequence” or “Cas protein binding segment” or “scaffold sequence.”

[0044] A gene regulating moiety can be a transcriptional modulator system (e.g., a gene repressor complex or a gene activator complex). For example, a gene regulating moiety can be a gene repressor complex comprising a dCas protein operatively coupled to (e.g., coupled to or fused with) a transcriptional repressor. Non-limiting examples of transcriptional repressors can include KRAB, SID, MBD2, MBD3, DNMT1, DNMT2A, DNMT3A, DNMT3B, DNMT3L, Mecp2, FOG1, ROM2, LSD1, ERD, SRDX repression domain, Pr-SET7/8, SUV4-20H1, RIZ1, JMJD2A, JHDM3A, JMJD2B, JMJD2C, GASC1, JMJD2D, JARIDIA, RBP2, JARIDIB/PLU-1, JARIDIC/SMCX, JARIDID/SMCY, HDACI, HDAC2, HDAC3, HDAC8, HDAC4, HDAC5, HDAC7, HDAC9, SIRTI, SIRT2, HDAC11, M.Hhal, METI, DRM3, ZMET2, CMT1, CMT2, Lamin A, and Lamin B. Alternatively, a gene regulating moiety can be a gene activator complex comprising a dCas protein operatively coupled to (e.g., fused to) a transcriptional activator. Non-limiting examples of transcriptional activators can include VP16, VP64, VP48, VP160, p65 subdomain, SETIA, SETIB, MLL1, MLL2, MLL3, MLL4, MLL5, ASHI, SYMD2, NSD1, JHDM2a, JHDM2b, UTX, JMJD3, GCN5, PCAF, CBP, p300, TAF1, TIP60/PLIP, MOZ/MYST3, MORF/MYST4, SRCI, ACTR, P160, CLOCK, TETICD, TETI, DME, DML1, DML2, and ROS1.

[0045] In some cases, the gene regulating moiety has enzymatic activity that modifies the target gene without cleaving the target gene. Modification of the target gene can cause, for example, epigenetic modifications that can modify gene expression and/or activity level. Examples of enzymatic activity that can be provided by a gene regulating moiety can include but are not limited to: nuclease activity such as that provided by a restriction enzyme (e.g., Fokl nuclease), methyltransferase activity such as that provided by a methyltransferase (e.g., Hhal DNA m5c-methyltransferase (M.Hhal), DNA methyltransferase 1 (DNMT1), DNA methyltransferase 3a (DNMT3a), DNA methyltransferase 3b (DNMT3b), METI, DRM3, ZMET2, CMT1, CMT2; demethylase activity such as that provided by a demethylase (e.g., Ten-Eleven Translocation (TET) dioxygenase 1 (TET1CD), TETI, DME, DML1, DML2, ROS 1), DNA repair activity, DNA damage activity, deamination activity such as that provided by a deaminase (e.g., a cytosine deaminase enzyme such as APOBEC1), dismutase activity, alkylation activity, depurination activity, oxidation activity, pyrimidine dimer forming activity, integrase activity such as that provided by an integrase and/or resolvase (e.g., Gin invertase such as the hyperactive mutant of the Gin invertase, GinH106Y; human immunodeficiency virus type 1 integrase (IN); Tn3 resolvase; and the like), transposase activity, recombinase activity such as that provided by a recombinase (e.g., catalytic domain of Gin recombinase), polymerase activity, ligase activity, helicase activity, photolyase activity, and glycosylase activity.

[0046] A gene regulating moiety can comprise an endonuclease. An endonuclease can be an enzyme that cleaves a phosphodiester bond within a polynucleotide chain. An endonuclease can comprise restriction endonucleases that cleave DNA at specific sites without damaging bases. Restriction endonucleases can include Type I, Type II, Type III, and Type IV endonucleases, which can further include subtypes. In some cases, an endonuclease can be Cas9. In some cases, an endonuclease can be a deactivated Cas (e.g., dCas, dCas9).

[0047] Unless specifically stated or obvious from context, the term “polynucleotide,” “oligonucleotide,” or “nucleic acid,” as used interchangeably herein, generally refers to a polymeric form of nucleotides of any length, either deoxyribonucleotides or ribonucleotides, or analogs thereof, either in single-, double-, or multi-stranded form. A polynucleotide can be exogenous or endogenous to a cell. A polynucleotide can exist in a cell-free environment. A polynucleotide can be a gene or fragment thereof. A polynucleotide can be DNA. A polynucleotide can be RNA. A polynucleotide can have any three-dimensional structure, and can perform any function, known or unknown. A polynucleotide can comprise one or more analogs (e.g. altered backbone, sugar, or nucleobase). If present, modifications to the nucleotide structure can be imparted before or after assembly of the polymer. Some non-limiting examples of analogs include: 5-bromouracil, peptide nucleic acid, xeno nucleic acid, morpholinos, locked nucleic acids, glycol nucleic acids, threose nucleic acids, dideoxynucleotides, cordycepin, 7-deaza-GTP, fluorophores (e.g. rhodamine or fluorescein linked to the sugar), thiol containing nucleotides, biotin linked nucleotides, fluorescent base analogs, CpG islands, methyl-7-guanosine, methylated nucleotides, inosine, thiouridine, pseudouridine, dihydrouridine, queuosine, and wyosine. Non-limiting examples of polynucleotides include coding or non-coding regions of a gene or gene fragment, loci (locus) defined from linkage analysis, exons, introns, messenger RNA (mRNA), transfer RNA (tRNA), ribosomal RNA (rRNA), short interfering RNA (siRNA), short-hairpin RNA (shRNA), micro-RNA (miRNA), ribozymes, cDNA, recombinant polynucleotides, branched polynucleotides, plasmids, vectors, isolated DNA of any sequence, isolated RNA of any sequence, cell-free polynucleotides including cell-free DNA (cfDNA) and cell-free RNA (cfRNA), nucleic acid probes, and primers. The sequence of nucleotides can be interrupted by non-nucleotide components.

[0048] The term “gene” generally refers to a nucleic acid (e.g., DNA such as genomic DNA and cDNA) and its corresponding nucleotide sequence that is involved in encoding an RNA transcript. The term as used herein with reference to genomic DNA includes intervening, non-coding regions as well as regulatory regions and can include 5′ and 3′ ends. In some uses, the term encompasses the transcribed sequences, including 5′ and 3′ untranslated regions (5′-UTR and 3′-UTR), exons and introns. In some genes, the transcribed region will contain “open reading frames” that encode polypeptides. In some uses of the term, a “gene” comprises only the coding sequences (e.g., an “open reading frame” or “coding region”) necessary for encoding a polypeptide. In some cases, genes do not encode a polypeptide, for example, ribosomal RNA genes (rRNA) and transfer RNA (tRNA) genes. In some cases, the term “gene” includes not only the transcribed sequences, but in addition, also includes non-transcribed regions including upstream and downstream regulatory regions, enhancers and promoters. A gene can refer to an “endogenous gene” or a native gene in its natural location in the genome of an organism. A gene can refer to an “exogenous gene” or a non-native gene. A non-native gene can refer to a gene not normally found in the host organism, but which is introduced into the host organism by gene transfer. A non-native gene can also refer to a gene not in its natural location in the genome of an organism. A non-native gene can also refer to a naturally occurring nucleic acid or polypeptide sequence that comprises mutations, insertions and/or deletions (e.g., non-native sequence).

[0049] The term “sequence identity” generally refers to an exact nucleotide-to-nucleotide or amino acid-to-amino acid correspondence of two polynucleotides or polypeptide sequences, respectively. Typically, techniques for determining sequence identity include determining the nucleotide sequence of a polynucleotide and/or determining the amino acid sequence encoded thereby, and comparing these sequences to a second nucleotide or amino acid sequence. Two or more sequences (polynucleotide or amino acid) can be compared by determining their “percent identity.” The percent identity of two sequences, whether nucleic acid or amino acid sequences, is the number of exact matches between two aligned sequences divided by the length of the longer sequence and multiplied by 100. Percent identity may also be determined, for example, by comparing sequence information using the advanced BLAST computer program, including version 2.2.9, available from the National Institutes of Health. The BLAST program is based on the alignment method of Karlin and Altschul, Proc. Natl. Acad. Sci. USA, 87:2264-2268 (1990) and as discussed in Altschul, et al., J. Mol. Biol., 215:403-410 (1990); Karlin And Altschul, Proc. Natl. Acad. Sci. USA, 90:5873-5877 (1993); and Altschul et al., Nucleic Acids Res., 25:3389-3402 (1997). The program may be used to determine percent identity over the entire length of the proteins being compared. Default parameters are provided to optimize searches with short query sequences in, for example, with the blastp program. The program also allows use of an SEG filter to mask-off segments of the query sequences as determined by the SEG program of Wootton and Federhen, Computers and Chemistry 17:149-163 (1993). Ranges of desired degrees of sequence identity are approximately 50% to 100% and integer values therebetween. In general, this disclosure encompasses sequences with at least 50%, at least 55%, at least 60%, at least 65%, at least 70%, at least 75%, at least 80%, at least 85%, at least 90%, at least 95%, or at least 98% sequence identity with any sequence provided herein.

[0050] The term “expression” generally refers to one or more processes by which a polynucleotide is transcribed from a DNA template (such as into an mRNA or other RNA transcript) and/or the process by which a transcribed mRNA is subsequently translated into peptides, polypeptides, or proteins. Transcripts and encoded polypeptides can be collectively referred to as “gene product.” If the polynucleotide is derived from genomic DNA, expression can include splicing of the mRNA in a eukaryotic cell. “Up-regulated,” with reference to expression, generally refers to an increased expression level of a polynucleotide (e.g., RNA such as mRNA) and/or polypeptide sequence relative to its expression level in a wild-type state while “down-regulated” generally refers to a decreased expression level of a polynucleotide (e.g., RNA such as mRNA) and/or polypeptide sequence relative to its expression in a wild-type state. Expression of a transfected gene can occur transiently or stably in a cell. During “transient expression” the transfected gene is not transferred to the daughter cell during cell division. Since its expression is restricted to the transfected cell, expression of the gene is lost over time. During transient expression, episomal DNA can be transferred to daughter cells, but since episomal DNA is not replicated, it is not permanently heritable and will dilute out over time. In contrast, stable expression of a transfected gene can occur when the gene is co-transfected with another gene that confers a selection advantage to the transfected cell. During stable expression, plasmids can have a DNA replication element that allows them to be inherited or integrated into the genome. Such a selection advantage may be a resistance towards a certain toxin that is presented to the cell.

[0051] The term “peptide,” “polypeptide,” or “protein,” as used interchangeably herein, generally refers to a polymer of at least two amino acid residues joined by peptide bond(s). This term does not connote a specific length of polymer, nor is it intended to imply or distinguish whether the peptide is produced using recombinant techniques, chemical or enzymatic synthesis, or is naturally occurring. The terms apply to naturally occurring amino acid polymers as well as amino acid polymers comprising at least one modified amino acid. In some cases, the polymer can be interrupted by non-amino acids. The terms include amino acid chains of any length, including full length proteins, and proteins with or without secondary and/or tertiary structure (e.g., domains). The terms also encompass an amino acid polymer that has been modified, for example, by disulfide bond formation, glycosylation, lipidation, acetylation, phosphorylation, oxidation, and any other manipulation such as conjugation with a labeling component. The terms “amino acid” and “amino acids,” as used herein, generally refer to natural and non-natural amino acids, including, but not limited to, modified amino acids and amino acid analogues. Modified amino acids can include natural amino acids and non-natural amino acids, which have been chemically modified to include a group or a chemical moiety not naturally present on the amino acid. Amino acid analogues can refer to amino acid derivatives. The term “amino acid” includes both D-amino acids and L-amino acids.

[0052] The term “derivative,” “variant,” or “fragment,” as used interchangeably herein with reference to a polypeptide, generally refers to a polypeptide related to a wild type polypeptide, for example either by amino acid sequence, structure (e.g., secondary and/or tertiary), activity (e.g., enzymatic activity) and/or function. Derivatives, variants and fragments of a polypeptide can comprise one or more amino acid variations (e.g., mutations, insertions, and deletions), truncations, modifications, or combinations thereof compared to a wild type polypeptide.

[0053] The term “engineered,” “chimeric,” or “recombinant,” as used herein with respect to a polypeptide molecule (e.g., a protein), generally refers to a polypeptide molecule having a heterologous amino acid sequence or an altered amino acid sequence as a result of the application of genetic engineering techniques to nucleic acids which encode the polypeptide molecule, as well as cells or organisms which express the polypeptide molecule. The term “engineered” or “recombinant,” as used herein with respect to a polynucleotide molecule (e.g., a DNA or RNA molecule), generally refers to a polynucleotide molecule having a heterologous nucleic acid sequence or an altered nucleic acid sequence as a result of the application of genetic engineering techniques. Genetic engineering techniques include, but are not limited to, PCR and DNA cloning technologies; transfection, transformation and other gene transfer technologies; homologous recombination; site-directed mutagenesis; and gene fusion. In some cases, an engineered or recombinant polynucleotide (e.g., a genomic DNA sequence) can be modified or altered by a gene editing moiety.

[0054] Unless specifically stated or obvious from context, the term “nucleotide” as used herein, generally refers to a base-sugar-phosphate combination. A nucleotide can comprise a synthetic nucleotide. A nucleotide can comprise a synthetic nucleotide analog. Nucleotides can be monomeric units of a nucleic acid sequence (e.g. deoxyribonucleic acid (DNA) and ribonucleic acid (RNA)). The term nucleotide can include ribonucleoside triphosphates adenosine triphosphate (ATP), uridine triphosphate (UTP), cytosine triphosphate (CTP), guanosine triphosphate (GTP) and deoxyribonucleoside triphosphates such as dATP, dCTP, dITP, dUTP, dGTP, dTTP, or derivatives thereof. Such derivatives can include, for example, [αS]dATP, 7-deaza-dGTP and 7-deaza-dATP, and nucleotide derivatives that confer nuclease resistance on the nucleic acid molecule containing them. The term nucleotide as used herein can refer to dideoxyribonucleoside triphosphates (ddNTPs) and their derivatives. Illustrative examples of dideoxyribonucleoside triphosphates can include, but are not limited to, ddATP, ddCTP, ddGTP, ddITP, and ddTTP. A nucleotide may be unlabeled or detectably labeled by well-known techniques. Labeling can also be carried out with quantum dots. Detectable labels can include, for example, radioactive isotopes, fluorescent labels, chemiluminescent labels, bioluminescent labels and enzyme labels. Fluorescent labels of nucleotides may include but are not limited fluorescein, 5-carboxyfluorescein (FAM), 2′7′-dimethoxy-4′5-dichloro-6-carboxyfluorescein (JOE), rhodamine, 6-carboxyrhodamine (R6G), N,N,N′,N′-tetramethyl-6-carboxyrhodamine (TAMRA), 6-carboxy-X-rhodamine (ROX), 4-(4′dimethylaminophenylazo) benzoic acid (DABCYL), Cascade Blue, Oregon Green, Texas Red, Cyanine and 5-(2′-aminoethyl) aminonaphthalene-1-sulfonic acid (EDANS). Specific examples of fluorescently labeled nucleotides can include [R6G] dUTP, [TAMRA] dUTP, [R110] dCTP, [R6G] dCTP, [TAMRA] dCTP, [JOE] ddATP, [R6G] ddATP, [FAM] ddCTP, [R110] ddCTP, [TAMRA] ddGTP, [ROX] ddTTP, [dR6G] ddATP, [dR110] ddCTP, [dTAMRA] ddGTP, and [dROX] ddTTP available from Perkin Elmer, Foster City, Calif. FluoroLink DeoxyNucleotides, FluoroLink Cy3-dCTP, FluoroLink Cy5-dCTP, FluoroLink Fluor X-dCTP, FluoroLink Cy3-dUTP, and FluoroLink Cy5-dUTP available from Amersham, Arlington Heights, Ill.; Fluorescein-15-dATP, Fluorescein-12-dUTP, Tetramethyl-rodamine-6-dUTP, IR770-9-dATP, Fluorescein-12-ddUTP, Fluorescein-12-UTP, and Fluorescein-15-2′-dATP available from Boehringer Mannheim, Indianapolis, Ind.; and Chromosome Labeled Nucleotides, BODIPY-FL-14-UTP, BODIPY-FL-4-UTP, BODIPY-TMR-14-UTP, BODIPY-TMR-14-dUTP, BODIPY-TR-14-UTP, BODIPY-TR-14-dUTP, Cascade Blue-7-UTP, Cascade Blue-7-dUTP, fluorescein-12-UTP, fluorescein-12-dUTP, Oregon Green 488-5-dUTP, Rhodamine Green-5-UTP, Rhodamine Green-5-dUTP, tetramethylrhodamine-6-UTP, tetramethylrhodamine-6-dUTP, Texas Red-5-UTP, Texas Red-5-dUTP, and Texas Red-12-dUTP available from Molecular Probes, Eugene, Oreg. Nucleotides can also be labeled or marked by chemical modification. A chemically modified single nucleotide can be biotin-dNTP. Some non-limiting examples of biotinylated dNTPs can include, biotin-dATP (e.g., bio-N6-ddATP, biotin-14-dATP), biotin-dCTP (e.g., biotin-11-dCTP, biotin-14-dCTP), and biotin-dUTP (e.g. biotin-11-dUTP, biotin-16-dUTP, biotin-20-dUTP).

[0055] The term “cell” generally refers to a biological cell. A cell can be the basic structural, functional and/or biological unit of a living organism. A cell can originate from any organism having one or more cells. Some non-limiting examples include: a prokaryotic cell, eukaryotic cell, a bacterial cell, an archaeal cell, a cell of a single-cell eukaryotic organism, a protozoa cell, a cell from a plant (e.g. cells from plant crops, fruits, vegetables, grains, soy bean, corn, maize, wheat, seeds, tomatoes, rice, cassava, sugarcane, pumpkin, hay, potatoes, cotton, cannabis, tobacco, flowering plants, conifers, gymnosperms, ferns, clubmosses, hornworts, liverworts, mosses), an algal cell, (e.g., Botryococcus braunii, Chlamydomonas reinhardtii, Nannochloropsis gaditana, Chlorella pyrenoidosa, Sargassum patens, C. Agardh, and the like), seaweeds (e.g. kelp), a fungal cell (e.g., a yeast cell, a cell from a mushroom), an animal cell, a cell from an invertebrate animal (e.g. fruit fly, cnidarian, echinoderm, nematode, etc.), a cell from a vertebrate animal (e.g., fish, amphibian, reptile, bird, mammal), a cell from a mammal (e.g., a pig, a cow, a goat, a sheep, a rodent, a rat, a mouse, a non-human primate, a human, etc.), and etcetera. Sometimes a cell is not originating from a natural organism (e.g., a cell can be a synthetically made, sometimes termed an artificial cell).

[0056] The term “differentiation” generally refers to a process by which an unspecialized (“uncommitted”) or less specialized cell acquires the features of a specialized cell such as, e.g., an immune cell. A differentiated or differentiation-induced cell is one that has taken on a more specialized (“committed”) position within the lineage of a cell. The term “committed” generally refers to a cell that has proceeded in the differentiation pathway to a point where, under normal circumstances, it will continue to differentiate into a specific cell type or subset of cell types, and cannot, under normal circumstances, differentiate into a different cell type or revert to a less differentiated cell type.

[0057] The term “dedifferentiation” or “de-differentiation” generally refers to a process by which a specialized, committed, or partially specialized cell loses the features of the specialized cell (e.g., a beta cell). A dedifferentiated cell or dedifferentiation-induced cell is one that has taken on a less specialized position within the lineage of a cell (e.g., a stem cell or a progenitor cell). A dedifferentiated cell (e.g., a stem cell or a progenitor cell) can subsequently differentiate into a different cell type or can revert to a less differentiated cell type.

[0058] The term “pluripotent” generally refers to the ability of a cell to form all lineages of the body or soma (e.g., the embryo proper). For example, embryonic stem cells are a type of pluripotent stem cells that are able to form cells from each of the three germs layers, the ectoderm, the mesoderm, and the endoderm. Pluripotency can be a continuum of developmental potencies ranging from the incompletely or partially pluripotent cell (e.g., an epiblast stem cell), which is unable to give rise to a complete organism to the more primitive, more pluripotent cell, which is able to give rise to a complete organism (e.g., an embryonic stem cell).

[0059] The term “induced pluripotent stem cells” (iPSCs) generally refers to stem cells that are derived from differentiated cells (e.g., differentiated adult, neonatal, or fetal cells) that have been induced or changed (e.g., reprogrammed) into cells capable of differentiating into tissues of all three germ or dermal layers: mesoderm, endoderm, and ectoderm. The iPSCs produced do not refer to cells as they are found in nature. In some cases, iPSCs can be engineered to differentiation directly into committed cells (e.g., beta cells). In some cases, iPSCs can be engineered to differentiate first into tissue-specific stem cells (e.g., endodermal stem cells, endocrine progenitor cells), which can be further induced to differentiate into committed cells (e.g., beta cells).

[0060] The term “embryonic stem cell” (ESCs) generally refers to cells derived from the naturally occurring pluripotent stem cells of the inner cell mass of the embryonic blastocyst. Embryonic stem cells are pluripotent and give rise during development to all derivatives of the three primary germ layers: ectoderm, endoderm and mesoderm. In some cases, ESCs can be engineered to differentiate directly into committed cells (e.g., beta cells). In some cases, ESCs can be engineered to differentiate first into tissue-specific stem cells (e.g., endodermal stem cells), which can be further induced to differentiate into committed cells (e.g., pancreatic lineage cells or beta cells).

[0061] The term “isolated stem cells” generally refers to any type of stem cells disclosed herein (e.g., ESCs, HSCs, endodermal stem cells, etc.) that are isolated from a multicellular organism. For example, HSCs can be isolated from a mammal's body, such as a human body. In another example, an embryonic stem cells can be isolated from an embryo.

[0062] The term “isolated” generally refers to a cell or a population of cells, which has been separated from its original environment. For example, a new environment of the isolated cells is substantially free of at least one component as found in the environment in which the “un-isolated” reference cells exist. An isolated cell can be a cell that is removed from some or all components as it is found in its natural environment, for example, isolated from a tissue or biopsy sample. The term also includes a cell that is removed from at least one, some or all components as the cell is found in non-naturally occurring environments, for example, isolated form a cell culture or cell suspension. Therefore, an isolated cell is partly or completely separated from at least one component, including other substances, cells or cell populations, as it is found in nature or as it is grown, stored or subsisted in non-naturally occurring environments.

[0063] The terms “beta cell,” “β-cell,” or “pancreatic beta cell,” as used interchangeably herein, generally refer to any insulin-producing cell in the pancreas. Non-limiting examples of beta cells are immature beta cells, mature beta cells, and cells which themselves differentiate into immature or mature beta cells such as pancreatic lineage cells.

[0064] The term “pancreatic lineage” when applied to a cell or a population generally refers to the capacity of that cell or population to produce glucagon, insulin, somatostatin, and/or pancreatic polypeptide (PP) (e.g., in vivo or ex vivo conditions). A pancreatic lineage cell can be at least partially differentiated alpha (α) cells (e.g., producing produce glucagon), beta (β) cells (e.g., producing insulin), delta (δ) cells (e.g., producing somatostatin), or PP cells (e.g., producing pancreatic polypeptide (PP)). Alternatively, a pancreatic lineage cell can be a cell which itself differentiate into a pancreatic cell, such as pancreatic progenitor cell.

[0065] The terms “pancreatic progenitor”, “pancreatic endocrine progenitor”, “pancreatic precursor,” and “pancreatic endocrine precursor” are used interchangeably herein to generally refer to a tissue-specific stem cell which is capable of becoming a pancreatic hormone expressing cell capable of forming pancreatic endocrine cells, pancreatic exocrine cells, or pancreatic duct cells. Pancreatic progenitor cells can be committed to differentiating towards at least one type of pancreatic cell, such as alpha (α) cells, beta (β) cells, delta (δ) cells, or PP cells.

[0066] The term “pancreatic lineage cells” generally refer to cells which produce or have the capacity to produce glucagon, insulin, somatostatin, and/or pancreatic polypeptide. Pancreatic lineage cells can be generated ex vivo by engineering isolated stem cells. Pancreatic lineage cells can develop from endodermal stem cells and can include but are not limited to definitive endoderm cells, primitive gut tube cells, posterior foregut cells, pancreatic progenitor cells, endocrine progenitor cells, pancreatic endocrine cells, pancreatic exocrine cells, pancreatic duct cells, alpha cells, delta cells, PP cells, immature beta cells, and mature beta cells. Pancreatic lineage cells can be generated in vivo by engineered stem cells in vivo, e.g., by administering such stem cells with any one of the heterologous genetic circuits disclosed herein.

### Overview

[0067] Biological programming, such as cellular programming, allows for the engineering of a cell to generate a desired outcome. Outcomes of cellular programming can include inducing or prevent a wide array of common and/or new cellular functions; outcomes can also include enhancing or repressing an already-occurring cellular function. Cellular programming can be accomplished through the use of a genetic circuit. Cellular programming can be accomplished through the manipulation of biomolecules (e.g., DNA). For example, CRISPR or CRISPR/Cas systems have been adopted for genome editing across many species due to its versatility and facile programmability. Cellular programming can affect endogenous or exogenous genes. Cellular programming can be implemented to function in a time-dependent manner or a time-independent manner. Cellular programming can be implemented to directly affect endogenous or exogenous genes. Alternatively, cellular programming can be implemented to indirectly affect endogenous or exogenous genes (e.g., by a heterologous gene regulating moiety or a heterologous genetic circuit for gene modulation).

[0068] Genetic circuits used in cellular programming can be used to control the cell fate of a cell or plurality of cells by inducing differentiation or dedifferentiation and converting from one cell type to another. Cellular programming is controlled through the regulation of desired expression and/or activity levels of a plurality of genes in a cell.

[0069] Although CRISPR/Cas systems are widely used for gene editing, Cas is essentially a single-turnover nuclease as it remains bound to the double-strand break it generates, and many regions of the genome are refractory to genome editing. Increased understanding of CRISPR/Cas-based genome editing has encouraged the development of cascading regulatory systems to further harness this technology for use in engineered cellular development. By implementing a series of activatable gRNA, genome editing can be regulated from target site to target site in more of a temporal manner, sequential genome edits can be executed to function like a domino effect, and cells can be barcoded. However, this simple barcoding, often using exogenous fluorophores, doesn't allow for the regulation of endogenous genes to effect cell differentiation.

[0070] Further, differentiation or dedifferentiation of cells is currently enabled through the use of exogenous serums and growth factors which bypass the underlying machineries of a cell's programming. The use of exogenous serums, growth factors, and other similar methods results in cells that are instructed to differentiate, but which lack the concomitant underlying biology (e.g., chromatin in the correct state, etc.) This lack often results in cells that either undergo premature termination of differentiation into non-desired cell types or which undergo inefficient differentiation whereby there are low yields of target cell types, or the resulting desired differentiated cells are only semi-functional. Semi-functional cells may resemble cell types of interest, but may lack key biological features necessary for the normal function of the desired differentiated cell type.

[0071] Thus, there remains an unmet need for an activatable, CRISPR/Cas system and use of the same to edit a target polynucleotide (e.g., a genome of a cell, in particular a eukaryotic cell), using cascades of gRNAs to form genetic circuits in order to single-handedly affect gene regulation and, in turn, cell-fate determination without the use of serums and exogenous growth factors. The preprogrammed, activatable, and self-regulating gRNA cascade CRISPR/Cas system finds use, e.g., in gene therapy, genetic circuitry, and/or complex cell-fate determination and/or control.

[0072] The present disclosure provides systems and methods for engineering a CRISPR/Cas9 system, which includes a Cas endonuclease and an array of cognate single guide RNAs (sgRNA or gRNA) that harbor inactivation sequences in a non-essential region and are activatable, to allow for modulation and modification of that system without the need for serum, growth factors, or other additional exogenous signals. The present disclosure also provides for an engineered cell that can contain any of the above-mentioned systems or that can be capable of performing any of the above-mentioned methods.

### Systems and Methods for Cell Programming Towards Pancreatic Lineage

[0073] Various aspects of the present disclosure provide systems for inducing a desired conversion from one type of cells into another type of cells. To this end, various aspects of the present disclosure provide methods for inducing a desired expression and/or activity levels (or profiles thereof) of one or more target genes in a cell.

[0074] In an aspect, the present disclosure provides for a system that converts a plurality of cells of a first type into a plurality of cells of a second cell type. The system can comprise a heterologous genetic circuit comprising a plurality of gate units. The plurality of gate units can comprise at least about 1, at least about 2, at least about 3, at least about 4, at least about 5, at least about 6, at least about 7, at least about 8, at least about 9, at least about 10, at least about 15, at least about 20, at least about 30, at least about 40, at least about 50, or more gate unit(s). The plurality of gate units can comprise at most about 50, at most about 40, at most about 30, at most about 20, at most about 15, at most about 10, at most about 9, at most about 8, at most about 7, at most about 6, at most about 5, at most about 4, at most about 3, at most about 2, or at most about 1 gate unit(s). The plurality of gate units can be different (e.g., comprising different polynucleotide sequences). Each gate unit of the plurality of gate units can affect the modulation of the expression and/or activity levels of a distinct target gene or a plurality of distinct target genes.

[0075] A heterologous genetic circuit as disclosed herein can operate with a plurality of gate units in series (e.g., the plurality of gate units are connected sequentially in an end-to-end manner forming a single path), in parallel (e.g., the plurality of gate units are connected across one another, forming, for example, two or more parallel sequential paths), or a combination thereof.

[0076] A plurality of gate units as disclosed herein can operate (e.g., as predetermined by the design of the heterologous genetic circuit) in concert to induce an outcome in a cell. The outcome in the cell can comprise cell function (e.g., movement, reproduction; response to external stimuli, nutritional output, excretion, respiration, growth) and/or cell state (e.g., cell fate, differentiation, quiescence, programmed cell death). Such outcomes can be ascertained in vitro, ex vivo, and/or in vivo. For example, an outcome as disclosed herein can be ascertained in vitro by (i) measuring expression level of a gene of interest by polymerase chain reaction (PCR) or Western blotting, (ii) staining via small molecules or antibodies, (iii) cell sorting based on cell size, morphology and/or surface protein expression, (iv) using assays (e.g. cell proliferation assays or metabolic activity assays) to measure phenotypic differentiation and cellular function, (v) microscopy, and/or (iv) screening for molecular and/or genetic differences using e.g., metabolomics, genomics, proteomics, lipidomics, epigenomics, and/or transcriptomics.

[0077] A plurality of gate units as disclosed herein can be sufficient to effect the conversion of a plurality of cells of a first cell type into a plurality of cells of a second cell type. For example, a plurality of gate units as disclosed herein can be sufficient to effect the conversion from a plurality of pluripotent stem cells (PSCs) into a plurality of tissue-specific progenitor cells. Alternatively, a plurality of gate units as disclosed herein can be necessary but insufficient to effect the conversion of a plurality of cells of a first cell type into a plurality of cells of a second cell type.

[0078] The outcome in the cell can comprise regulation of a distinct target gene or set of distinct target genes. The plurality of gate units can induce distinct modulations of the plurality of target genes (e.g., in a sequential manner), such that a collection of the modulations of the genes in concert yield a final expression and/or activity profile of the cell. The final expression and/or activity level profile of the cell can exemplify an outcome, such as a conversion of the cell from one cell type to another (or a process thereof).

[0079] In some cases, of the plurality of gate units, as disclosed herein, can be necessary but individually insufficient to effect the desired expression and/or activity profile of the target cell. Thus, the outcome in the cell (e.g., enhanced cell function, induced cell state, etc.) induced by the plurality of gate units may not be possible in absence of any one of the plurality of gate units. Alternatively, a degree or measure of the outcome in the cell induced by the plurality of gate units can be different (e.g., greater for a positive marker, or less for a negative marker) than a degree or measure of the outcome in a control cell that is induced by none, one or more, but not all of the plurality of gate units, and/or by all of the plurality gate units occurring through a different sequential order of events.

[0080] A second gate unit can be activated by a first gate unit (e.g. directly or indirectly). For example, the second gate unit can be directly activated by the first gate unit. Alternatively, the second gate unit can be activated by one or more additional gate units that are activated by the first gate unit (e.g., directly or indirectly). The one or more additional gate units can comprise at least about 1, at least about 2, at least about 3, at least about 4, at least about 5, at least about 6, at least about 7, at least about 8, at least about 9, at least about 10, at least about 15, at least about 20, at least about 30, at least about 40, at least about 50 or more gate unit(s). The one or more additional gate units at most about 50, at most about 40, at most about 30, at most about 20, at most about 15, at most about 10, at most about 9, at most about 8, at most about 7, at most about 6, at most about 5, at most about 4, at most about 3, at most about 2, or at most about 1 gate unit(s). Yet in another alternative, the second gate unit can be activated via another moiety responsible for activating the first gate unit (e.g., an activating moiety, a different gate unit, etc.). Yet in another alternative, the first gate unit and the second gate unit can be activated by different activating moieties (e.g., different polynucleotide molecules, such as different guide nucleic acid molecules).

[0081] In some cases, the term “proGuide” as generally used herein may refer to such vector (e.g., a plasmid) that encodes the activatable gNA. The proGuide can be an example of a gate moiety. The proGuide can be an example of a gene regulating moiety.

[0082] In some embodiments, a proGuide as provided herein can encode an activatable guide nucleic acid molecule, e.g., having the inactivation polynucleotide sequence (e.g., one or more poly X sequences, such as one or more polyT sequences). In some cases, a portion of the proGuide encoding the activatable guide nucleic acid molecule can comprise various regions that are sequentially linked (e.g., from 5′ to 3′), comprising upstream stem (e.g., an upstream cut site), a poly T unit (or “proUnit” or “proGuide Unit” as used interchangeably herein), and a downstream stem (e.g., a downstream cut site). The upstream stem and the downstream stem may correspond to the “stem region” polynucleotide sequences that are at least partially complementary to each other.

[0083] A proGuide as provided herein can encode an activatable guide nucleic acid molecule, e.g., having the inactivation polynucleotide sequence (e.g., one or more polyX sequences, such as one or more polyT sequences). In some embodiments, a portion of the proGuide encoding the activatable guide nucleic acid molecule can comprise various regions that are sequentially linked, comprising a spacer sequence, an extra sequence (e.g., a linker sequence or a backbone sequence), an upstream stem, a poly T unit, and a downstream stem. In some embodiments, the extra sequence can exhibit at least 50%, at least 55%, at least 60%, at least 65%, at least 70%, at least 75%, at least 80%, at least 85%, at least 90%, at least 95%, at least 98%, at least 99%, or 100% sequence identity to GTTTTAGAGCTA (SEQ ID NO: 2027). In some embodiments, a portion of the proGuide encoding the activatable guide nucleic acid molecule can comprise various regions that are sequentially linked, comprising a spacer sequence, an extra sequence (e.g., a linker sequence or a backbone sequence), an upstream stem, a poly T unit, and a downstream stem, as shown in TABLE 4 (SEQ ID Nos: 1-2024). In some embodiments, a portion of the proGuide encoding the activatable guide nucleic acid molecule can comprise various regions that are sequentially linked, comprising a spacer sequence, an extra sequence (e.g., a linker sequence or a backbone sequence), an upstream stem, a poly T unit, and a downstream stem, as shown in TABLE 4 (SEQ ID Nos: 1-2024) as a concatenated sequence with “-” to distinguish between the various regions. In some cases, upon modification or removal of the polyT unit, the upstream stem and the downstream stem can form a part of a scaffold sequence of a functional guide nucleic acid molecule. In some embodiments, when a spacer sequence does not start with a G, a G is added before the spacer sequence. In some embodiments, the addition of the G before the spacer sequence helps increase the expression of the RNA moiety from a promotor. In some embodiments, stem1 and stem2 are reverse complements of each other. In some embodiments, upstream stem and downstream stem are reverse complements of each other. In some embodiments, stem 1 can exhibit at least 50%, at least 55%, at least 60%, at least 65%, at least 70%, at least 75%, at least 80%, at least 85%, at least 90%, at least 95%, at least 98%, at least 99%, or 100% sequence identity to a member of the polynucleotide sequences as shown in Table 6 (SEQ ID Nos: 2120-2142). In some embodiments, stem2 can exhibit at least 50%, at least 55%, at least 60%, at least 65%, at least 70%, at least 75%, at least 80%, at least 85%, at least 90%, at least 95%, at least 98%, at least 99%, or 100% sequence identity to a member of the polynucleotide sequences as shown in Table 6 (SEQ ID Nos: 2143-2165).

[0084] A domain of the polynucleotide sequence that encodes (or corresponds to) the molecule of interest can comprise a polyX sequence. The polyX sequence can be sufficient to reduce expression of the molecule of interest (e.g., the guide nucleic acid molecule) from the polynucleotide sequence. For example, the polyX sequence can be disposed within the domain encoding the molecule of interest (e.g., not at either the 5′ end or the 3′ end of such domain), such that expression of the molecule of interest (e.g., transcription of an RNA molecule of interest) would be disrupted (e.g., terminated) in the middle of the expression.

[0085] Accordingly, the poly X sequence (e.g., in the polynucleotide sequence encoding the molecule of interest) may be referred to as a termination sequence (e.g., a non-canonical termination sequence for its sequence and/or its position), as a disruption sequence (e.g., for disruption of full expression of the molecule of interest), as an inactivation sequence (e.g., for inactivating function of the polynucleotide sequence or the molecule of interest).

[0086] In some cases, the poly X sequence can be located within (e.g., not at a terminal end) a polynucleotide sequence, such as a DNA sequence or an RNA sequence. In some cases, the poly X sequence can be located at least about 10, at least about 11, at least about 12, at least about 13, at least about 14, at least about 15, at least about 20, at least about 25, at least about 30, at least about 35, at least about 40, at least about 45, at least about 50, at least about 55, at least about 60, at least about 65, at least about 70, at least about 75, at least about 80, at least about 85, at least about 90, at least about 95, or at least about 100 bases away from the 3′ end of the polynucleotide sequence. In some cases, the poly X sequence can be located at least about 10, at least about 11, at least about 12, at least about 13, at least about 14, at least about 15, at least about 20, at least about 25, at least about 30, at least about 35, at least about 40, at least about 45, at least about 50, at least about 55, at least about 60, at least about 65, at least about 70, at least about 75, at least about 80, at least about 85, at least about 90, at least about 95, or at least about 100 bases away from the 5′ end of the polynucleotide sequence. In some cases, the poly X sequence can be located at a terminal end of a nucleic acid sequence.

[0087] In some cases, the polyT or polyU sequence can be located within (e.g., not at a terminal end) a polynucleotide sequence, such as a DNA sequence or an RNA sequence. In some cases, the polyT or polyU sequence can be located at least about 10, at least about 11, at least about 12, at least about 13, at least about 14, at least about 15, at least about 20, at least about 25, at least about 30, at least about 35, at least about 40, at least about 45, at least about 50, at least about 55, at least about 60, at least about 65, at least about 70, at least about 75, at least about 80, at least about 85, at least about 90, at least about 95, or at least about 100 bases away from the 3′ end of the polynucleotide sequence. In some cases, the polyT or polyU sequence can be located at least about 10, at least about 11, at least about 12, at least about 13, at least about 14, at least about 15, at least about 20, at least about 25, at least about 30, at least about 35, at least about 40, at least about 45, at least about 50, at least about 55, at least about 60, at least about 65, at least about 70, at least about 75, at least about 80, at least about 85, at least about 90, at least about 95, or at least about 100 bases away from the 5′ end of the polynucleotide sequence. In some cases, the polyT or polyU sequence can be located at a terminal end of a nucleic acid sequence. In some cases, an RNA which comprises a polyU sequence can also be represented by a DNA which comprises a polyT sequence.

[0088] A polyX sequence (e.g., a polyT sequence or a polyU sequence) can comprise at least about 2, at least about 3, at least about 4, at least about 5, at least about 6, at least about 7, at least about 8, at least about 9, at least about 10, at least about 11, at least about 12, at least about 13, at least about 14, at least about 15, at least about 20, at least about 30, at least about 40, at least about 50 X, at least about 60, at least about 70, at least about 80, at least about 90, or at least about 100 bases. A poly X sequence can comprise at most about 100, at most about 90, at most about 80, at most about 70, at most about 60, at most about 50, at most about 40, at most about 30, at most about 20, at most about 15, at most about 14, at most about 13, at most about 12, at most about 11, at most about 10, at most about 9, at most about 8, at most about 7, at most about 6, at most about 5, at most about 4, at most about 3, or at most about 2 X bases. A polyX sequence can be represented by a complementary polyX sequence in a corresponding complementary DNA strand (e.g., a polyT, as disclosed herein as a DNA sequence, can also be referred to as poly A in the complementary DNA strand). The polyX sequence as disclosed can comprise a plurality of X bases. The plurality of X bases can be disclosed sequentially adjacent to one another (e.g., TT, TTT, TTTT, TTTTT, etc.). Alternatively or in addition to, the plurality of X bases can be separated by one or more additional nucleotides that are not X. The one or more additional nucleotides can comprise a single type of nucleotide or different types of nucleotides.

[0089] In some embodiments, a proGuide can comprise inactivation polynucleotide sequence that exhibits at least or up to about 50%, at least or up to about 55%, at least or up to about 60%, at least or up to about 65%, at least or up to about 70%, at least or up to about 75%, at least or up to about 80%, at least or up to about 85%, at least or up to about 86%, at least or up to about 87%, at least or up to about 88%, at least or up to about 89%, at least or up to about 90%, at least or up to about 91%, at least or up to about 92%, at least or up to about 93%, at least or up to about 94%, at least or up to about 95%, at least or up to about 96%, at least or up to about 97%, at least or up to about 98%, at least or up to about 99%, or substantially about 100% sequence identity to TTTTTTTTT (SEQ ID NO: 2025), or a complementary sequence thereof.

[0090] In some cases, the non-canonical termination sequence can comprise or consist substantially of a polynucleotide sequence exhibiting at least or up to about 40%, at least or up to about 45%, at least or up to about 50%, at least or up to about 55%, at least or up to about 60%, at least or up to about 65%, at least or up to about 70%, at least or up to about 75%, at least or up to about 80%, at least or up to about 85%, at least or up to about 86%, at least or up to about 87%, at least or up to about 88%, at least or up to about 89%, at least or up to about 90%, at least or up to about 91%, at least or up to about 92%, at least or up to about 93%, at least or up to about 94%, at least or up to about 95%, at least or up to about 96%, at least or up to about 97%, at least or up to about 98%, at least or up to about 99%, or substantially about 100% sequence identity to the polynucleotide sequence of TTTTTTTTcagccaactccaaTTTTTTTT (SEQ ID NO: 2026), or a complementary sequence thereof.

[0091] In some embodiments, a proGuide can comprise a target polynucleotide domain at or adjacent to an inactivation polynucleotide sequence (e.g., at or adjacent to 5′ and/or 3′ ends of the inactivation polynucleotide sequences), which target polynucleotide domain can be targeted (e.g., via sequential activation mechanism of the heterologous genetic circuit as provided herein) to modify (e.g., edit, cleave) the inactivation polynucleotide sequence, thereby rendering the proGuide to express an activated guide nucleic acid molecule. The target polynucleotide domain of a proGuide may not exhibit sequence identity to any comparable endogenous polynucleotide sequence in a cell, thereby to avoid inadvertent targeting and modulation of an endogenous target gene.

[0092] In some embodiments, the inactivation polynucleotide sequence of the proGuide can be disposed between two target polynucleotide domains, which may or may not be targetable by a common guide nucleic acid sequence. In some cases, the two target polynucleotide domains can be reverse and complementary to one another, such that the inactivation polynucleotide sequence can be modified or cleaved by the same mechanism (e.g., same spacer sequence of a guide nucleic acid molecule).

[0093] In some embodiments, a proGuide can comprise a polynucleotide sequence that exhibits at least or up to about 50%, at least or up to about 55%, at least or up to about 60%, at least or up to about 65%, at least or up to about 70%, at least or up to about 75%, at least or up to about 80%, at least or up to about 85%, at least or up to about 86%, at least or up to about 87%, at least or up to about 88%, at least or up to about 89%, at least or up to about 90%, at least or up to about 91%, at least or up to about 92%, at least or up to about 93%, at least or up to about 94%, at least or up to about 95%, at least or up to about 96%, at least or up to about 97%, at least or up to about 98%, at least or up to about 99%, or substantially about 100% sequence identity to one or more members from SEQ ID NOs: 1-92 (e.g., EGF targeting), SEQ ID NOs: 93-184 (e.g., FEV targeting), SEQ ID NOs: 185-276 (e.g., FOXA2 targeting), SEQ ID NOs: 277-368 (e.g., GATA4 targeting), SEQ ID NOs: 369-460 (e.g., gata6 targeting), SEQ ID NOs: 461-552 (e.g., GCG targeting), SEQ ID NOs: 553-644 (e.g., INS targeting), SEQ ID NOs: 645-736 (e.g., isll targeting), SEQ ID NOs: 737-828 (e.g., LMXIA targeting), SEQ ID NOs: 829-920 (e.g., MAFA targeting), SEQ ID NOs: 921-1012 (e.g., NEUROD1), SEQ ID NOs: 1013-1104 (e.g., NEUROG3 targeting), SEQ ID NOs: 1105-1196 (e.g., NKX2-2 targeting), SEQ ID NOs: 1197-1288 (e.g., NKX6-1 targeting), SEQ ID NOs: 1289-1380 (e.g., ONECUT1 targeting), SEQ ID NOs: 1381-1472 (e.g., PDX1 targeting), SEQ ID NOs: 1473-1564 (e.g., PTFla targeting), SEQ ID NOs: 1565-1656 (e.g., SHH targeting), SEQ ID NOs: 1657-1748 (e.g., sox 17 targeting), SEQ ID NOs: 1749-1840 (e.g., SOX9 targeting), SEQ ID NOs: 1841-1932 (e.g., SST targeting), SEQ ID NOs: 1933-2024 (e.g., TBXT targeting), or a complementary sequence thereof.

[0094] The second gate unit can be activatable to induce inactivation of the first gate unit that has been activated. The terms “inactivation” or “disruption” may be used interchangeably herein. Inactivation and as disclosed herein can be induced by generating a modification (e.g., a cleavage such as a single-strand or double-strand break, and indel, etc.) to at least a portion of the first gate unit (e.g., a gate moiety and/or a gene regulating moiety of the first gate unit) that is responsible for inducing the first distinct modulation of the target gene.

[0095] Inactivation by a gate moiety and/or a gene regulating moiety of the first gate unit as disclosed herein can be achieved through a endonuclease-based system (e.g., a CRISPR/Cas system). Alternatively, or in addition to, inactivation can be achieved through the use of a transcriptional modulator system (e.g. a transcriptional repressor). Alternatively, or in addition to, inactivation can be achieved through CRISPRi steric hindrance without the necessity of an additional transcriptional modulator. An endonuclease-transcriptional modulator system (e.g., a Cas-repressor) can be used to achieve polynucleotide cleavage (e.g. for inactivating the gate moiety and/or the gene regulating moiety). Polynucleotide cleavage can create a nucleic acid modification such as a single-strand break, a double-strand break, an insertion, a deletion, or an insertion-deletion (indel). Alternatively or in addition to, the endonuclease-transcriptional modulator system (e.g., a Cas-repressor) can be used to modulate target gene expression. Alternatively, or in addition to, a CAS transcriptional modulator system that lacks endonuclease activity (dCAS or bare CAS with a shortened spacer insufficient to support cleavage) targets to a DNA region and physically halts transcription elongation resulting in repression of the target gene (CRISPRi).

[0096] Alternatively, the second gate unit can be activatable to amplify or enhance activation of the first gate unit that has been activated. Amplification or enhancement of the first gate unit can be induced by generating a modification (e.g., a cleavage such as a single-strand or double-strand break, and indel, etc.) to at least a portion of the first gate unit (e.g., a gate moiety and/or a gene regulating moiety of the first gate unit) that is responsible for inducing the first distinct modulation of the target gene.

[0097] In some cases, a first gate unit modulates a first target gene. Alternatively, or in addition to, a first gate unit can also modulate a second gate unit. The modulation of the second gate unit can occur at least or up to about 1 millisecond, at least or up to about 2 milliseconds, at least or up to about 3 milliseconds, at least or up to about 4 milliseconds, at least or up to about 5 milliseconds, at least or up to about 6 milliseconds, at least or up to about 7 milliseconds, at least or up to about 8 milliseconds, at least or up to about 9 milliseconds, at least or up to about 10 milliseconds, at least or up to about 20 milliseconds, at least or up to about 30 milliseconds, at least or up to about 40 milliseconds, at least or up to about 50 milliseconds, at least or up to about 60 milliseconds, at least or up to about 70 milliseconds, at least or up to about 80 milliseconds, at least or up to about 90 milliseconds, at least or up to about 100 milliseconds, at least or up to about 200 milliseconds, at least or up to about 300 milliseconds, at least or up to about 400 milliseconds, at least or up to about 500 milliseconds, at least or up to about 600 milliseconds, at least or up to about 700 milliseconds, at least or up to about 800 milliseconds, at least or up to about 900 milliseconds, at least or up to about 1 second, at least or up to about 2 seconds, at least or up to about 3 seconds, at least or up to about 4 seconds, at least or up to about 5 seconds, at least or up to about 6 seconds, at least or up to about 7 seconds, at least or up to about 8 seconds, at least or up to about 9 seconds, at least or up to about 10 seconds, at least or up to about 15 seconds, at least or up to about 20 seconds, at least or up to about 30 seconds, at least or up to about 40 seconds, at least or up to about 50 seconds, at least or up to about 1 minute, at least or up to about 2 minutes, at least or up to about 3 minutes, at least or up to about 4 minutes, at least or up to about 5 minutes, at least or up to about 6 minutes, at least or up to about 7 minutes, at least or up to about 8 minutes, at least or up to about 9 minutes, at least or up to about 10 minutes, at least or up to about 20 minutes, at least or up to about 30 minutes, at least or up to about 40 minutes, at least or up to about 50 minutes, at least or up to about 1 hour, at least or up to about 2 hours, at least or up to about 3 hours, at least or up to about 4 hours, at least or up to about 5 hours, at least or up to about 6 hours, at least or up to about 7 hours, at least or up to about 8 hours, at least or up to about 9 hours, at least or up to about 10 hours, at least or up to about 12 hours, at least or up to about 16 hours, at least or up to about 20 hours, or at least or up to about 24 hours, or more after the modulation of the first gate unit, as ascertained by rt-qPCR, Western blotting, or other methods.

[0098] In some cases, the second gate unit can modulate a second target gene. The modulation of the second target gene can occur at least or up to about 1 millisecond, about 2 milliseconds, about 3 milliseconds, about 4 milliseconds, about 5 milliseconds, about 6 milliseconds, about 7 milliseconds, about 8 milliseconds, about 9 milliseconds, about 10 milliseconds, about 20 milliseconds, about 30 milliseconds, about 40 milliseconds, about 50 milliseconds, about 60 milliseconds, about 70 milliseconds, about 80 milliseconds, about 90 milliseconds, about 100 milliseconds, about 200 milliseconds, about 300 milliseconds, about 400 milliseconds, about 500 milliseconds, about 600 milliseconds, about 700 milliseconds, about 800 milliseconds, about 900 milliseconds, about 1 second, about 2 seconds, about 3 seconds, about 4 seconds, about 5 seconds, about 6 seconds, about 7 seconds, about 8 seconds, about 9 seconds, about 10 seconds, about 15 seconds, about 20 seconds, about 30 seconds, about 40 seconds, about 50 seconds, about 1 minute, about 2 minutes, about 3 minutes, about 4 minutes, about 5 minutes, about 6 minutes, about 7 minutes, about 8 minutes, about 9 minutes, about 10 minutes, about 20 minutes, about 30 minutes, about 40 minutes, about 50 minutes, about 1 hour, about 2 hours, about 3 hours, about 4 hours, about 5 hours, about 6 hours, about 7 hours, about 8 hours, about 9 hours, about 10 hours, about 12 hours, about 16 hours, about 20 hours, about 24 hours, or more after the modulation of the first target gene, as ascertained by rt-qPCR, Western blotting, or other methods.

[0099] The heterologous genetic circuit can comprise a plurality of gate units that are sequentially activated, e.g., activated in series one after another. The plurality of gate units can comprise a functional gate unit that is preconfigured such that it is activated to regulate (e.g., directly regulate) expression and/or epigenetic profile of a target gene (e.g., an endogenous targe gene). The plurality of gate units can further comprise one or more additional gate units that are preconfigured (i) to be activated prior to the functional gate unit and (ii) to effect a subsequent activation of the functional gate unit. In some cases, the one or more additional gate units can be preconfigured to be activated to regulate one or more additional target genes. Alternatively, the one or more additional gate units may not be preconfigured to regulate any target gene (e.g., any endogenous target gene) when activated. Such one or more additional gate units may instead serve to delay (e.g., in terms of time) activation of the functional gate unit during operation of the heterologous genetic circuit, thereby delaying the expression and/or epigenetic profile of the target gene of the functional gate unit, and thus the one or more additional gate units may be referred to as “blank” gate unit(s). The heterologous genetic circuit can comprise at least or up to about 1 blank gate unit, at least or up to about 2 blank gate units, at least or up to about 3 blank gate units, at least or up to about 4 blank gate units, at least or up to about 5 blank gate units, at least or up to about 6 blank gate units, at least or up to about 7 blank gate units, at least or up to about 8 blank gate units, at least or up to about 9 blank gate units, at least or up to about 10 blank gate units, at least or up to about 11 blank gate units, at least or up to about 12 blank gate units, at least or up to about 13 blank gate units, at least or up to about 14 blank gate units, at least or up to about 15 blank gate units, at least or up to about 16 blank gate units, at least or up to about 27 blank gate units, at least or up to about 18 blank gate units, at least or up to about 19 blank gate units, at least or up to about 20 blank gate units, at least or up to about 25 blank gate units, at least or up to about 30 blank gate units, at least or up to about 35 blank gate units, at least or up to about 40 blank gate units, at least or up to about 45 blank gate units, at least or up to about 50 blank gate units.

[0100] In some cases, use of the one or more blank gate units can delay activation of the functional gate unit (e.g., as ascertained by measurement of expression/epigenetic profile of the target gene, or as ascertained by measurement of expression of a functional variant or transcribed product of the functional gate unit) by at least or up to about 1 minute, at least or up to about 5 minutes, at least or up to about 10 minutes, at least or up to about 30 minutes, at least or up to about 1 hour, at least or up to about 2 hours, at least or up to about 3 hours, at least or up to about 4 hours, at least or up to about 5 hours, at least or up to about 6 hours, at least or up to about 7 hours, at least or up to about 8 hours, at least or up to about 9 hours, at least or up to about 10 hours, at least or up to about 11 hours, at least or up to about 12 hours, at least or up to about 13 hours, at least or up to about 14 hours, at least or up to about 15 hours, at least or up to about 16 hours, at least or up to about 17 hours, at least or up to about 18 hours, at least or up to about 19 hours, at least or up to about 20 hours, at least or up to about 21 hours, at least or up to about 22 hours, at least or up to about 23 hours, at least or up to about 24 hours, at least or up to about 2 days, at least or up to about 3 days at least or up to about 4 days at least or up to about 5 days at least or up to about 6 days, or at least or up to about 7 days.

[0101] In some cases, modification of a target gene by a gate unit can inactivate a gene. For example, modification of a gene can stop expression and/or activity level of a target gene. Alternatively, modification of a gene can decrease or reduce the expression and/or activity level of a target gene. In some cases, modification of a gene can increase the expression and/or activity level of a target gene. Alternatively, modification of a gene can maintain the expression and/or activity level of a target gene.

[0102] In some cases, modification of a gene can decrease the expression and/or activity level of the target gene by at least about 0.1%, at least about 0.2%, at least about 0.3%, at least about 0.4%, at least about 0.5%, at least about 0.6%, at least about 0.7%, at least about 0.8%, at least about 0.9%, at least about 1%, at least about 2%, at least about 3%, at least about 4%, at least about 5%, at least about 6%, at least about 7%, at least about 8%, at least about 9%, at least about 10%, at least about 20%, at least about 30%, at least about 40%, at least about 50%, at least about 60%, at least about 70%, at least about 80%, at least about 90%, at least about 100%, at least about 200%, at least about 300%, at least about 400%, at least about 500%, or more. Modification of a gene can decrease in the expression and/or activity level of the target gene by at most about 500%, at most about 400%, at most about 300%, at most about 200%, at most about 100%, at most about 90%, at most about 80%, at most about 70%, at most about 60%, at most about 50%, at most about 40%, at most about 30%, at most about 20%, at most about 10%, at most about 9%, at most about 8%, at most about 7%, at most about 6%, at most about 5%, at most about 4%, at most about 3%, at most about 2%, at most about 1%, at most about 0.9%, at most about 0.8%, at most about 0.7%, at most about 0.6%, at most about 0.5%, at most about 0.4%, at most about 0.3%, at most about 0.2%, at most about 0.1%, or less.

[0103] In some cases, modification of a gene can increase the expression and/or activity level of the target gene by at least about 0.1%, at least about 0.2%, at least about 0.3%, at least about 0.4%, at least about 0.5%, at least about 0.6%, at least about 0.7%, at least about 0.8%, at least about 0.9%, at least about 1%, at least about 2%, at least about 3%, at least about 4%, at least about 5%, at least about 6%, at least about 7%, at least about 8%, at least about 9%, at least about 10%, at least about 20%, at least about 30%, at least about 40%, at least about 50%, at least about 60%, at least about 70%, at least about 80%, at least about 90%, at least about 100%, at least about 200%, at least about 300%, at least about 400%, at least about 500%, at least about 600%, at least about 700%, at least about 800%, at least about 900%, at least about 1,000%, at least about 2,000%, at least about 3,000%, at least about 4,000%, at least about 5,000%, at least about 6,000%, at least about 7,000%, at least about 8,000%, at least about 9,000%, at least about 10,000%, at least about 100,000%, at least about 1,000,000% or more. Modification of a gene can increase in the expression and/or activity level of the target gene by at most about 1,000,000%, at most about 100,000%, at most about 9,000%, at most about 8,000%, at most about 7,000%, at most about 6,000%, at most about 5,000%, at most about 4,000%, at most about 3,000%, at most about 2,000%, at most about 1,000%, at most about 900%, at most about 800%, at most about 700%, at most about 600%, at most about 500%, at most about 400%, at most about 300%, at most about 200%, at most about 100%, at most about 90%, at most about 80%, at most about 70%, at most about 60%, at most about 50%, at most about 40%, at most about 30%, at most about 20%, at most about 10%, at most about 9%, at most about 8%, at most about 7%, at most about 6%, at most about 5%, at most about 4%, at most about 3%, at most about 2%, at most about 1%, at most about 0.9%, at most about 0.8%, at most about 0.7%, at most about 0.6%, at most about 0.5%, at most about 0.4%, at most about 0.3%, at most about 0.2%, at most about 0.1%, or less.

[0104] In some cases, modification of a gene can decrease the expression and/or activity level of the target gene by at least or up to about 0.1-fold, at least or up to about 0.2-fold, at least or up to about 0.3-fold, at least or up to about 0.4-fold, at least or up to about 0.5-fold, at least or up to about 0.6-fold, at least or up to about 0.7-fold, at least or up to about 0.8-fold, at least or up to about 0.9-fold, at least or up to about 1-fold, at least or up to about 2-fold, at least or up to about 3-fold, at least or up to about 4-fold, at least or up to about 5-fold, at least or up to about 6-fold, at least or up to about 7-fold, at least or up to about 8-fold, at least or up to about 9-fold, at least or up to about 10-fold, at least or up to about 20-fold, at least or up to about 30-fold, at least or up to about 40-fold, at least or up to about 50-fold, at least or up to about 60-fold, at least or up to about 70-fold, at least or up to about 80-fold, at least or up to about 90-fold, at least or up to about 100-fold, at least or up to about 500-fold, at least or up to about 1,000-fold, at least or up to about 5,000-fold, or at least or up to about 10,000-fold, as compared to a control expression and/or activity level. Modification of a gene can decrease the expression and/or activity level of the target gene by at most or less than about 10,000-fold, at most or less than about 5,000-fold, at most or less than about 1,000-fold, at most or less than about 500-fold, at most or less than about 100-fold, at most or less than about 90-fold, at most or less than about 80-fold, at most or less than about 70-fold, at most or less than about 60-fold, at most or less than about 50-fold, at most or less than about 40-fold, at most or less than about 30-fold, at most or less than about 20-fold, at most or less than about 10-fold, at most or less than about 9-fold, at most or less than about 8-fold, at most or less than about 7-fold, at most or less than about 6-fold, at most or less than about 5-fold, at most or less than about 4-fold, at most or less than about 3-fold, at most or less than about 2-fold, at most or less than about 1-fold, at most or less than about 0.9-fold, at most or less than about 0.8-fold, at most or less than about 0.7-fold, at most or less than about 0.6-fold, at most or less than about 0.5-fold, at most or less than about 0.4-fold, at most or less than about 0.3-fold, at most or less than about 0.2-fold, at most or less than about 0.1-fold, as compared to a control expression and/or activity level.

[0105] In some cases, modification of a gene can increase the expression and/or activity level of the target gene by at least or up to about 0.1-fold, at least or up to about 0.2-fold, at least or up to about 0.3-fold, at least or up to about 0.4-fold, at least or up to about 0.5-fold, at least or up to about 0.6-fold, at least or up to about 0.7-fold, at least or up to about 0.8-fold, at least or up to about 0.9-fold, at least or up to about 1-fold, at least or up to about 2-fold, at least or up to about 3-fold, at least or up to about 4-fold, at least or up to about 5-fold, at least or up to about 6-fold, at least or up to about 7-fold, at least or up to about 8-fold, at least or up to about 9-fold, at least or up to about 10-fold, at least or up to about 20-fold, at least or up to about 30-fold, at least or up to about 40-fold, at least or up to about 50-fold, at least or up to about 60-fold, at least or up to about 70-fold, at least or up to about 80-fold, at least or up to about 90-fold, at least or up to about 100-fold, at least or up to about 500-fold, at least or up to about 1,000-fold, at least or up to about 5,000-fold, or at least or up to about 10,000-fold, as compared to a control expression and/or activity level. Modification of a gene can increase the expression and/or activity level of the target gene by at most or less than about 10,000-fold, at most or less than about 5,000-fold, at most or less than about 1,000-fold, at most or less than about 500-fold, at most or less than about 100-fold, at most or less than about 90-fold, at most or less than about 80-fold, at most or less than about 70-fold, at most or less than about 60-fold, at most or less than about 50-fold, at most or less than about 40-fold, at most or less than about 30-fold, at most or less than about 20-fold, at most or less than about 10-fold, at most or less than about 9-fold, at most or less than about 8-fold, at most or less than about 7-fold, at most or less than about 6-fold, at most or less than about 5-fold, at most or less than about 4-fold, at most or less than about 3-fold, at most or less than about 2-fold, at most or less than about 1-fold, at most or less than about 0.9-fold, at most or less than about 0.8-fold, at most or less than about 0.7-fold, at most or less than about 0.6-fold, at most or less than about 0.5-fold, at most or less than about 0.4-fold, at most or less than about 0.3-fold, at most or less than about 0.2-fold, at most or less than about 0.1-fold, as compared to a control expression and/or activity level.

[0106] An expression and/or activity profile of a gene of interest (e.g. a differentiation marker) can be compared to a control gene (e.g., a house keeping gene such as GAPDH), relative expression levels of two or more genes of interest (e.g., a ratio of expression or activity level between a stem cell marker and a differentiation marker), relative average expression levels of a gene of interest compared to average expression levels of that same gene of interest in a cell type of interest, etc.

[0107] In some cases, activation of the plurality of gate units may be a result of a single activation (e.g., by a single activating moiety at a single time point) of the heterologous genetic circuit. The plurality of gate units can comprise one of the first gate unit and the second gate that are preconfigured to be activated sequentially upon activation of the heterologous genetic circuit by the single activation. In some cases, one of the first and second gate unit can be activated by the single activating moiety (e.g., a guide nucleic acid), while the other of the first and second gate unit can be activated by an additional activating moiety (e.g., a different guide nucleic acid) that is different from the activating moiety of the heterologous genetic circuit. The additional activating moiety can be a part of the heterologous genetic circuit that is generated (e.g., expressed) only upon activation of the heterologous genetic circuit. Alternatively or in addition to, the first and second gate unit can each be activated by different activating moieties that are not the same as the activating moiety of the heterologous genetic circuit. Such different activating moieties can be parts of the heterologous genetic circuit that are generated (e.g., expressed) only upon activation of the heterologous genetic circuit.

[0108] In some embodiments of any one of the systems disclosed herein, a gate unit can comprise a gate (e.g., at least or up to about 1 gate moiety, at least or up to about 2 gate moieties, at least or up to about 3 gate moieties, at least or up to about 4 gate moieties, at least or up to about 5 gate moieties, etc.) and/or a gene regulating moiety (e.g., at least or up to about 1 gene regulating moiety, at least or up to about 2 gene regulating moieties, at least or up to about 3 gene regulating moieties, at least or up to about 4 gene regulating moieties, at least or up to about 5 gene regulating moieties, at least or up to about 6 gene regulating moieties, at least or up to about 7 gene regulating moieties, at least or up to about 8 gene regulating moieties, at least or up to about 9 gene regulating moieties, at least or up to about 10 gene regulating moieties, etc.). A gate moiety as disclosed herein can comprise a guide nucleic acid molecule (gNA) (e.g., at least or up to about 1 gNA molecule, at least or up to about 2 gNA molecules, at least or up to about 3 gNA molecules, at least or up to about 4 gNA molecules, at least or up to about 5 gNA molecules, etc.). A gene regulating moiety as disclosed herein can comprise a gNA (e.g., at least or up to about 1 gNA molecule, at least or up to about 2 gNA molecules, at least or up to about 3 gNA molecules, at least or up to about 4 gNA molecules, at least or up to about 5 gNA molecules, etc.). The guide nucleic acid molecule as disclosed herein can comprise, but is not limited to, DNA, RNA, any analog of such, or any combination thereof. In some embodiments of any one of the systems disclosed herein, the gate moiety and/or the gene regulating moiety can be activatable to form a complex with an enzyme (e.g., an endonuclease and/or an exonuclease), and the complex can be configured to or capable of binding a target polynucleotide, e.g., to regulate expression and/or activity level of the target polynucleotide or another polynucleotide sequence operatively coupled to the target polynucleotide. For example, the complex can regulate expression and/or activity level of a gene comprising the target polynucleotide.

[0109] In some cases, a guide nucleic acid molecules (gNA) (e.g., a functional gNA) that is expressed by the second gate unit, upon activation, can create a modification to at least a portion of the first gate unit. For example, the activated gNA of the second gate unit can generate the modification to a polynucleotide sequence of the first gate unit that encodes a gNA (e.g., an activatable gNA) or a promoter sequence of the first gate unit that is operatively coupled to such gNA of the same first gate unit. Such modification can render the gNA of the first gate unit inoperable when expressed (e.g., reduced or inhibited specific binding to the target gene). Alternatively, the modification can reduce (e.g., inhibit) expression of the gNA of the first gate unit.

[0110] In some cases, modification of a polynucleotide sequence (e.g., as a component of a gate unit, such as a gate moiety) or a target gene can be caused by a single-stranded break wherein there is a discontinuity in one nucleotide strand. Inactivation of a polynucleotide sequence or a target gene can be caused by at least about 1, at least about 2, at least about 3, at least about 4, at least about 5, at least about 6, at least about 7, at least about 8, at least about 9, at least about 10, or more single-stranded breaks. In some cases, inactivation of a gene can be caused by at most about 10, at most about 9, at most about 8, at most about 7, at most about 6, at most about 5, at most about 4, at most about 3, at most about 2, or at most about 1 single-stranded breaks.

[0111] In some cases, a gNA can have a size (e.g., including both spacer sequence and scaffold sequence) of at least or up to about 60 nucleotides, at least or up to about 70 nucleotides, at least or up to about 80 nucleotides, at least or up to about 85 nucleotides, at least or up to about 90 nucleotides, at least or up to about 95 nucleotides, at least or up to about 100 nucleotides, at least or up to about 105 nucleotides, at least or up to about 110 nucleotides, at least or up to about 120 nucleotides, at least or up to about 130 nucleotides, at least or up to about 140 nucleotides, at least or up to about 150 nucleotides, or at least or up to about 200 nucleotides.

[0112] In some cases, a scaffold sequence of a gNA can have a size of at least or up to about 30 nucleotides, at least or up to about 35 nucleotides, at least or up to about 40 nucleotides, at least or up to about 45 nucleotides, at least or up to about 50 nucleotides, at least or up to about 55 nucleotides, at least or up to about 60 nucleotides, at least or up to about 65 nucleotides, at least or up to about 70 nucleotides, at least or up to about 75 nucleotides, at least or up to about 80 nucleotides, at least or up to about 85 nucleotides, at least or up to about 90 nucleotides, at least or up to about 95 nucleotides, at least or up to about 100 nucleotides, at least or up to about 100 nucleotides, at least or up to about 120 nucleotides, at least or up to about 130 nucleotides, at least or up to about 140 nucleotides, or at least or up to about 150 nucleotides.

[0113] In some cases, a spacer sequence of a gNA can have a size of at least or up to about 10 nucleotides, at least or up to about 11, at least or up to about 12, at least or up to about 13, at least or up to about 14, at least or up to about 15, at least or up to about 16, at least or up to about 17, at least or up to about 18, at least or up to about 19, at least or up to about 20, at least or up to about 21, at least or up to about 22, at least or up to about 23, at least or up to about 24, at least or up to about 25, at least or up to about 26, at least or up to about 27, at least or up to about 28, at least or up to about 29, or at least or up to about 30 nucleotides.

[0114] In some embodiments of any one of the systems disclosed herein, an initial (or the first) gate unit of the heterologous genetic circuit as disclosed herein may be activated (e.g., directly activated) by an activating moiety. The activating moiety can directly bind at least the portion of the initial gate unit to activate the initial gate unit, e.g., thereby to sequentially activate the heterologous genetic circuit. Alternatively, the activating moiety may activate the initial gate unit without directly binding the at least the portion of the initial gate unit (e.g., through the use of electromagnetic energy). In some cases, the initial gate unit can comprise at least one gate moiety and at least one gene regulating moiety. In some cases, the initial gate unit can comprise at least one gate moiety but may not and need not comprise a gene regulating moiety. In some cases, the initial gate unit can comprise at least one gene regulating moiety but may not and need not comprise a gate moiety (e.g., the activating moiety may be configured to activate the initiate gate unit and at least one additional gate unit).

[0115] In some embodiments of any one of the systems disclosed herein, the gNA of the gate moiety and/or the gene regulating moiety (e.g., a gNA encoded by the gate moiety and/or the gene regulating moiety) can be an activatable gNA. The activatable gNA can be one of, but not limited to, any of the following: ribonucleotides (e.g., gRNA), deoxyribonucleotides, any analog of such, or any combination thereof. In some embodiments, a vector (or expression cassette) encoding the activatable gNA can comprise an inactivation polynucleotide sequence to render the gNA inactive until activated (e.g., until the inactivation polynucleotide sequence is modified or removed from the vector. For example, the inactivation polynucleotide sequence can encode a self-cleaving polynucleotide molecule (e.g., a ribozyme). Alternatively or in addition to, the inactivation polynucleotide sequence can encode non-canonical transcription termination sequence, as described below. The inactivation polynucleotide sequence can be a part of or adjacent to a region of the vector that encodes (i) a spacer sequence of the gNA, (ii) a scaffold sequence of the gNA, and/or (ii) any linker sequence between the spacer sequence and the scaffold sequence. The vector can comprise at least or up to about 1 inactivation polynucleotide sequence, at least or up to about 2 inactivation polynucleotide sequences, at least or up to about 3 inactivation polynucleotide sequences, at least or up to about 4 inactivation polynucleotide sequences, at least or up to about 5 inactivation polynucleotide sequences, at least or up to about 6 inactivation polynucleotide sequences, at least or up to about 7 inactivation polynucleotide sequences, at least or up to about 8 inactivation polynucleotide sequences, at least or up to about 9 inactivation polynucleotide sequences, or at least or up to about 10 inactivation polynucleotide sequences.

[0116] In some cases, the term “proGuide” as generally used herein may refer to such vector (e.g., a plasmid) that encodes the activatable gNA. The proGuide can be an example of a gate moiety. The proGuide can be an example of a gene regulating moiety.

[0117] In some embodiments, the activatable gNA molecule can be a self-cleaving gNA (e.g., the gRNA contains a cis ribozyme). For example, when the activatable gNA is expressed in a cell, the activatable gNA may be self-cleavable to become non-functional (e.g., not configured to bind a target gene), unless a gene encoding the activatable gNA is modified prior to the expression of the activatable gNA. In some embodiments, the activatable gNA molecule comprises a non-canonical transcription termination sequence (e.g., a polyX sequence, such as a polyU sequence or a polyT sequence), such that a functional gNA molecule is not expressed until a gene encoding the activatable gNA having the non-canonical transcription termination sequence can be modified (e.g., to remove some or all of the transcription termination sequence). Thus, in absence of the modification of the transcription termination sequence, a non-functional variant (e.g., a non-functional fragment) of the gNA may be expressed. In some embodiments, the gNA can be synthetic. In some embodiments, the gNA can have a fluorescent label attached.

[0118] In some cases, a size of the polyT sequence is greater than or equal to a threshold length, wherein the threshold length is sufficient to reduce expression of the guide nucleic acid molecule from the polynucleotide sequence. Accordingly, a plasmid (e.g., a gate moiety or a gene regulating moiety) can encode an inactivated gNA comprising the polyT sequence that is greater than or equal to the threshold length, and editing of such plasmid to reduce the length of the polyT to below the threshold length can permit expression of the gNA in its entirety without early termination, thereby activating the gNA. In some cases, the polyT sequence comprises at least 5 T. In some cases, the polyT sequence comprises at least 7 T. In some cases, the polyT sequence comprises at least 8 T. In some cases, the polyT sequence comprises at least 10 T. In some cases, the polyT sequence comprises between 5 T and 15 T. In some cases, the polyT sequence comprises one or more additional nucleotides that are not T.

[0119] In some cases, a gene regulating moiety (e.g., a guide nucleic acid and/or an endonuclease) can be configured to bind to a target polynucleotide sequence operatively coupled to a target gene in a cell. The target gene can comprise an encoding polynucleotide sequence that encodes a target nucleic acid molecule or a target protein. The target polynucleotide sequence can be a part of the encoding polynucleotide sequence. Alternatively, the target polynucleotide sequence may not be a part of the encoding polynucleotide sequence. For example, the target polynucleotide sequence can be upstream of the encoding polynucleotide sequence (e.g., part of a promoter of the encoding polynucleotide sequence, such as a transcription start site (TSS).

[0120] As provided herein, when the heterologous genetic circuit is activated to induce a plurality of distinct modulations of a target gene, as provided herein, the plurality of distinct modulations of the target gene can be different (e.g., different degrees of change in the expression and/or activity level of the target gene. For example, a first modulation exerted by a first gene unit and second modulation exerted by a second gate unit can be different by at least about 0.1%, at least about 0.2%, at least about 0.3%, at least about 0.4%, at least about 0.5%, at least about 0.6%, at least about 0.7%, at least about 0.8%, at least about 0.9%, at least about 1%, at least about 2%, at least about 3%, at least about 4%, at least about 5%, at least about 6%, at least about 7%, at least about 8%, at least about 9%, at least about 10%, at least about 20%, at least about 30%, at least about 40%, at least about 50%, at least about 60%, at least about 70%, at least about 80%, at least about 90%, at least about 100%, at least about 200%, at least about 300%, at least about 400%, or at least about 500%. The first modulation and the second modulation can be different by at most about 500%, at most about 400%, at most about 300%, at most about 200%, at most about 100%, at most about 90%, at most about 80%, at most about 70%, at most about 60%, at most about 50%, at most about 40%, at most about 30%, at most about 20%, at most about 10%, at most about 9%, at most about 8%, at most about 7%, at most about 6%, at most about 5%, at most about 4%, at most about 3%, at most about 2%, at most about 1%, at most about 0.9%, at most about 0.8%, at most about 0.7%, at most about 0.6%, at most about 0.5%, at most about 0.4%, at most about 0.3%, at most about 0.2%, or at most about 0.1%. Alternatively or in addition to, the distinct modulation of the target gene can be substantially the same (e.g., the same). The plurality of distinct modulations can be individually sufficient to induce the desired change in expression and/or activity level of the target gene. Alternatively, the distinct modulations can be individually insufficient to induce the desired change in expression and/or activity level of the target gene.

[0121] One or more target genes as disclosed herein can comprise one or more endogenous genes (e.g., genomic DNA, mRNA, mitochondrial DNA, etc.), exogenous genes, transgenes, or a combination thereof.

[0122] In some cases, a guide nucleic acid molecules (gNA) (e.g., a functional gNA) that is expressed by the second gate unit, upon activation, can create a modification to at least a portion of the first gate unit. For example, the activated gNA of the second gate unit can generate the modification to a polynucleotide sequence of the first gate unit that encodes a gNA (e.g., an activatable gNA) or a promoter sequence of the first gate unit that is operatively coupled to such gNA of the same first gate unit. Such modification can render the gNA of the first gate unit inoperable when expressed (e.g., reduced or inhibited specific binding to the target gene). Alternatively, the modification can reduce (e.g., inhibit) expression of the gNA of the first gate unit.

[0123] In some embodiments of any one of the systems disclosed herein, an initial (or the first) gate unit of the heterologous genetic circuit as disclosed herein may be activated (e.g., directly activated) by an activating moiety. The activating moiety can directly bind at least the portion of the initial gate unit to activate the initial gate unit, e.g., thereby to sequentially activate the heterologous genetic circuit. Alternatively, the activating moiety may activate the initial gate unit without directly binding the at least the portion of the initial gate unit (e.g., through the use of electromagnetic energy). In some cases, the initial gate unit can comprise at least one gate moiety and at least one gene regulating moiety. In some cases, the initial gate unit can comprise at least one gate moiety but may not and need not comprise a gene regulating moiety. In some cases, the initial gate unit can comprise at least one gene regulating moiety but may not and need not comprise a gate moiety (e.g., the activating moiety may be configured to activate the initiate gate unit and at least one additional gate unit).

[0124] In some embodiments of any one of the systems disclosed herein, the gNA of the gate moiety and/or the gene regulating moiety (e.g., a gNA encoded by the gate moiety and/or the gene regulating moiety) can be an activatable gNA. The activatable gNA can be one of, but not limited to, any of the following: ribonucleotides (e.g., gRNA), deoxyribonucleotides, any analog of such, or any combination thereof. In some embodiments, the activatable gNA molecule can be a self-cleaving gNA (e.g., the gRNA contains a cis ribozyme). For example, when the activatable gNA is expressed in a cell, the activatable gNA may be self-cleavable to become non-functional (e.g., not configured to bind a target gene), unless a gene encoding the activatable gNA is modified prior to the expression of the activatable gNA. In some embodiments, the gNA can be synthetic. In some embodiments, the gNA can have a fluorescent label attached.

[0125] In some embodiments of any one of the systems disclosed herein, the gNA of the gate moiety and/or the gene regulating moiety (e.g., a gNA encoded by the gate moiety and/or the gene regulating moiety) can comprise a spacer sequence. In some cases, the spacer sequence can be specific to the target gene. Alternatively, the spacer sequence can be agnostic to the target gene.

[0126] As abovementioned, the length the spacer sequence of the gNA can affect the ability of the gNA to mediate Cas nuclease activity. In some cases, gNAs with spacer sequences of differing lengths can be used in the same heterologous genetic circuit to affect different types of cleavage, activation, inactivation, and/or modulation of one or more target nucleic acids. In some cases, a gNA spacer sequence that is shorter than a threshold length (e.g., about 16 nucleotides) can preclude nuclease activity of a Cas-transcriptional modulator, while still mediating DNA binding for transcriptional modulation of a target gene. In some cases, a gNA spacer sequence that is shorter than at least about 25 nucleotides, at least about 20 nucleotides, at least about 19 nucleotides, at least about 18 nucleotides, at least about 17 nucleotides, at least about 16 nucleotides, at least about 15 nucleotides, at least about 15 nucleotides, at least about 14 nucleotides, at least about 13 nucleotides, at least about 12 nucleotides, at least about 11 nucleotides, or at least about 10 nucleotides can preclude nuclease activity of a Cas protein while still mediating DNA binding.

[0127] For example, a gNA comprising a 20-nucleotide spacer sequence (e.g., a gNA encoded by a gate moiety for targeting a gene regulating moiety plasmid) can be sufficient to facilitate nuclease activity of an endonuclease (e.g. a Cas or a Cas-transcriptional modulator fusion protein) at a target polynucleotide sequence. Alternatively or in addition to, a gNA comprising a 14-nucleotide spacer sequence (e.g., a gNA encoded by a gene regulating moiety) can hybridize to DNA but may not be long enough to mediate nuclease activity—it can only facilitate endonuclease binding to the cognate DNA sequence. Accordingly, the shorter gNA can selectively allow for transcriptional modulation of a target gene though the use of a endonuclease-transcriptional modulator system (e.g. a Cas-activator system, a Cas-repressor system), without cleavage of the target gene.

[0128] In some cases, modification of a polynucleotide sequence (e.g., as a component of a gate unit, such as a gate moiety) or a target gene can be caused by a double-stranded break wherein there is a discontinuity in both nucleotide strands. In some cases, a number of such double-stranded break (e.g., necessary for such modification) can be at least or up to about 1, at least or up to about 2, at least or up to about 3, at least or up to about 4, at least or up to about 5, at least or up to about 6, at least or up to about 7, at least or up to about 8, at least or up to about 9, or at least or up to about 10.

[0129] In some cases, modification of a polynucleotide sequence (e.g., as a component of a gate unit, such as a gate moiety) or a target gene can be caused by an indel, also known as an insertion-deletion mutation. An indel mutation can comprise a frameshift or non-frameshift mutation. An indel mutation can comprise a point mutation, also called a base substitution, wherein only one base or base pair is modified. An indel mutation can comprise at least about 1, at least about 2, at least about 3, at least about 4, at least about 5, at least about 6, at least about 7, at least about 8, at least about 9, at least about 10, at least about 15, at least about 20, at least about 30, at least about 40, at least about 50, at least about 60, at least about 70, at least about 80, at least about 90, at least about 100, at least about 200, at least about 300, at least about 400, at least about 500, at least about 600, at least about 700, at least about 800, at least about 900, at least about 1000, at least about 2000, or more bases or base pairs in length. An indel mutation can comprise at most about 2000, at most about 1000, at most about 900, at most about 800, at most about 700, at most about 600, at most about 500, at most about 400, at most about 300, at most about 200, at most about 100, at most about 90, at most about 80, at most about 70, at most about 60, at most about 50, at most about 40, at most about 30, at most about 20, at most about 15, at most about 10, at most about 9, at most about 8, at most about 7, at most about 6, at most about 5, at most about 4, at most about 3, at most about 2, or at most about 1 bases or base pairs in length.

[0130] In some cases, modification of a polynucleotide sequence (e.g., as a component of a gate unit, such as a gate moiety) or a target gene can be achieved without cleavage of the polynucleotide sequence or the target gene. For example, a gene regulating moiety (e.g., a nucleic acid molecule and/or an endonuclease, such as a complex comprising a CRISPR/Cas protein and a guide nucleic acid molecule) can specifically bind to the polynucleotide sequence or the target gene, such that expression and/or activity of the polynucleotide sequence or the target gene is modified. The gene regulating moiety can comprise a transcriptional repressor or a transcriptional activator, as provided herein. Alternatively or in addition not, the gene regulating moiety can induce epigenetic modification (or epigenome modification) as provided herein.

[0131] In some cases, the modification of the polynucleotide sequence or the target gene, as provided herein, can inactivate the polynucleotide sequence or the target gene. For example, modification of the polynucleotide sequence or the target gene can repress or reduce expression and/or activity level of the polynucleotide sequence or the target gene. In some cases, the modification of the polynucleotide sequence or the target gene, as provided herein, can activate the polynucleotide sequence or the target gene. For example, modification of the polynucleotide sequence or the target gene can increase expression and/or activity level of the polynucleotide sequence or the target gene.

[0132] In some cases, the modification of the polynucleotide sequence or the target gene, as provided herein, can comprise decreasing the expression and/or activity level of the polynucleotide sequence or the target gene by at least or up to about 0.1%, at least or up to about 0.2%, at least or up to about 0.3%, at least or up to about 0.4%, at least or up to about 0.5%, at least or up to about 1%, at least or up to about 2%, at least or up to about 3%, at least or up to about 4%, at least or up to about 5%, at least or up to about 10%, at least or up to about 15%, at least or up to about 20%, at least or up to about 30%, at least or up to about 40%, at least or up to about 50%, at least or up to about 60%, at least or up to about 70%, at least or up to about 80%, at least or up to about 90%, at least or up to about 95%, at least or up to about 99%, or about 100% (e.g., as compared to a control that, for example, lacks the modification).

[0133] In some cases, the modification of the polynucleotide sequence or the target gene, as provided herein, can comprise decreasing the expression and/or activity level of the polynucleotide sequence or the target gene by at least or up to about 0.1-fold, at least or up to about 0.2-fold, at least or up to about 0.3-fold, at least or up to about 0.4-fold, at least or up to about 0.5-fold, at least or up to about 0.6-fold, at least or up to about 0.7-fold, at least or up to about 0.8-fold, at least or up to about 0.9-fold, at least or up to about 1-fold, at least or up to about 1.5-fold, at least or up to about 2-fold, at least or up to about 3-fold, at least or up to about 4-fold, at least or up to about 5-fold, at least or up to about 6-fold, at least or up to about 7-fold, at least or up to about 8-fold, at least or up to about 9-fold, at least or up to about 10-fold, at least or up to about 11-fold, at least or up to about 12-fold, at least or up to about 13-fold, at least or up to about 14-fold, at least or up to about 15-fold, at least or up to about 20-fold, at least or up to about 30-fold, at least or up to about 40-fold, at least or up to about 50-fold, or at least or up to about 100-fold (e.g., as compared to a control that, for example, lacks the modification).

[0134] In some cases, the modification of the polynucleotide sequence or the target gene, as provided herein, can comprise increasing the expression and/or activity level of the polynucleotide sequence or the target gene by at least or up to about 0.1%, at least or up to about 0.2%, at least or up to about 0.3%, at least or up to about 0.4%, at least or up to about 0.5%, at least or up to about 1%, at least or up to about 2%, at least or up to about 3%, at least or up to about 4%, at least or up to about 5%, at least or up to about 10%, at least or up to about 15%, at least or up to about 20%, at least or up to about 30%, at least or up to about 40%, at least or up to about 50%, at least or up to about 60%, at least or up to about 70%, at least or up to about 80%, at least or up to about 90%, at least or up to about 100%, at least or up to about 150%, at least or up to about 200%, at least or up to about 300%, at least or up to about 400%, or at least or up to about 500% (e.g., as compared to a control that, for example, lacks the modification).

[0135] In some cases, the modification of the polynucleotide sequence or the target gene, as provided herein, can comprise increasing the expression and/or activity level of the polynucleotide sequence or the target gene by at least or up to about 0.1-fold, at least or up to about 0.2-fold, at least or up to about 0.3-fold, at least or up to about 0.4-fold, at least or up to about 0.5-fold, at least or up to about 0.6-fold, at least or up to about 0.7-fold, at least or up to about 0.8-fold, at least or up to about 0.9-fold, at least or up to about 1-fold, at least or up to about 1.5-fold, at least or up to about 2-fold, at least or up to about 3-fold, at least or up to about 4-fold, at least or up to about 5-fold, at least or up to about 6-fold, at least or up to about 7-fold, at least or up to about 8-fold, at least or up to about 9-fold, at least or up to about 10-fold, at least or up to about 11-fold, at least or up to about 12-fold, at least or up to about 13-fold, at least or up to about 14-fold, at least or up to about 15-fold, at least or up to about 20-fold, at least or up to about 30-fold, at least or up to about 40-fold, at least or up to about 50-fold, at least or up to about 100-fold, at least or up to about 200-fold, at least or up to about 300-fold, at least or up to about 400-fold, at least or up to about 500-fold, or at least or up to about 1,000-fold (e.g., as compared to a control that, for example, lacks the modification).

[0136] In some embodiments of any one of the systems disclosed herein, the gNA of the gate moiety and/or the gene regulating moiety (e.g., a gNA encoded by the gate moiety and/or the gene regulating moiety) can comprise a spacer sequence. In some cases, the spacer sequence can exhibit specific binding to a target gene (e.g., an endogenous target gene). Alternatively, the spacer sequence can be agnostic to the target gene, but rather can exhibit specific binding to a target polynucleotide sequence of another gate moiety or another gene regulating moiety. Example spacer sequences can be found in Table 5.

[0137] Non-limiting examples of the one or more target genes can comprise EGF, FEV, FOXA2, GATA4, gata6, GCG, INS, isl1, LMX1A, MAFA, NEUROD1, NEUROG3, NKX2-2, NKX6-1, ONECUT1, PDX1, PTF1a, SHH, sox 17, SOX9, SST, and/or TBXT. In some cases, a spacer sequence of a guide nucleic acid (e.g., a guide RNA) against a target gene as provided herein can comprise a polynucleotide sequence (e.g., a consecutive polynucleotide sequence) that exhibits at least or up to about 50%, at least or up to about 55%, at least or up to about 60%, at least or up to about 65%, at least or up to about 70%, at least or up to about 75%, at least or up to about 80%, at least or up to about 85%, at least or up to about 86%, at least or up to about 87%, at least or up to about 88%, at least or up to about 89%, at least or up to about 90%, at least or up to about 91%, at least or up to about 92%, at least or up to about 93%, at least or up to about 94%, at least or up to about 95%, at least or up to about 96%, at least or up to about 97%, at least or up to about 98%, at least or up to about 99%, or substantially about 100% sequence identity to one or more members selected from SEQ ID NOs: 2030-2117 (e.g., such sequence identity to one or more members selected from SEQ ID NOs: 2030-2033 for EGF targeting, SEQ ID NOs: 2034-2037 FEV targeting, SEQ ID NOs: 2038-2041 FOXA2 targeting, SEQ ID NOs: 2041-2045 GATA4 targeting, SEQ ID NOs: 2046-2049 gata6 targeting, SEQ ID NOs: 2050-2053 GCG targeting, SEQ ID NOs: 2054-2057 INS targeting, SEQ ID NOs: 2058-2061 isl1 targeting, SEQ ID NOs: 2062-2065 LMX1A targeting, SEQ ID NOs: 2066-2069 MAFA targeting, SEQ ID NOs: 2070-2073 NEUROD1 targeting, SEQ ID NOs: 2074-2077 NEUROG3 targeting, SEQ ID NOs: 2078-2081 NKX2-2 targeting, SEQ ID NOs: 2082-2085 NKX6-1 targeting, SEQ ID NOs: 2086-2089 ONECUT1 targeting, SEQ ID NOs: 2090-2093 PDX1 targeting, SEQ ID NOs: 2094-2097 PTF1a targeting, SEQ ID NOs: 2098-2101 SHH targeting, SEQ ID NOs: 2102-2105 sox17, SEQ ID NOs: 2106-2109 SOX9 targeting, SEQ ID NOs: 2110-2113 SST targeting, and SEQ ID NOs: 2114-2117 TBXT targeting), or a complementary sequence thereof. In some cases, a heterologous gene modulator as provided herein can exhibit specific binding to a target gene that comprises a polynucleotide sequence (e.g., a consecutive polynucleotide sequence) that exhibits at least or up to about 50%, at least or up to about 55%, at least or up to about 60%, at least or up to about 65%, at least or up to about 70%, at least or up to about 75%, at least or up to about 80%, at least or up to about 85%, at least or up to about 86%, at least or up to about 87%, at least or up to about 88%, at least or up to about 89%, at least or up to about 90%, at least or up to about 91%, at least or up to about 92%, at least or up to about 93%, at least or up to about 94%, at least or up to about 95%, at least or up to about 96%, at least or up to about 97%, at least or up to about 98%, at least or up to about 99%, or substantially about 100% sequence identity to one or more members selected from SEQ ID NOs: 2030-2117 (e.g., such sequence identity to one or more members selected from SEQ ID NOs: 2030-2033 for EGF targeting, SEQ ID NOs: 2034-2037 FEV targeting, SEQ ID NOs: 2038-2041 FOXA2 targeting, SEQ ID NOs: 2041-2045 GATA4 targeting, SEQ ID NOs: 2046-2049 gata6 targeting, SEQ ID NOs: 2050-2053 GCG targeting, SEQ ID NOs: 2054-2057 INS targeting, SEQ ID NOs: 2058-2061 isl1 targeting, SEQ ID NOs: 2062-2065 LMX1A targeting, SEQ ID NOs: 2066-2069 MAFA targeting, SEQ ID NOs: 2070-2073 NEUROD1 targeting, SEQ ID NOs: 2074-2077 NEUROG3 targeting, SEQ ID NOs: 2078-2081 NKX2-2 targeting, SEQ ID NOs: 2082-2085 NKX6-1 targeting, SEQ ID NOs: 2086-2089 ONECUT1 targeting, SEQ ID NOs: 2090-2093 PDX1 targeting, SEQ ID NOs: 2094-2097 PTF1a targeting, SEQ ID NOs: 2098-2101 SHH targeting, SEQ ID NOs: 2102-2105 sox17, SEQ ID NOs: 2106-2109 SOX9 targeting, SEQ ID NOs: 2110-2113 SST targeting, and SEQ ID NOs: 2114-2117 TBXT targeting), or a complementary sequence thereof (e.g., with uracil-to-thymine conversion).

[0138] The gene regulating moiety as disclosed herein can comprise an endonuclease, such as a CRISPR-Cas protein exhibiting at least a portion of its nuclease activity. For example, the nuclease activity can be utilized to activate expression or activity of a guide nucleic acid molecule, thereby to activate at least a portion of the heterologous genetic circuit as described herein.

[0139] The gene regulating moiety as disclosed herein can comprise an endonuclease that is operatively coupled to a transcriptional effector, including a transcriptional activator or a transcriptional repressor, that is heterologous to the cell. The endonuclease may be naturally or may be engineered to exhibit reduced nuclease activity (or substantially no nuclease activity), such that the endonuclease can be used to specifically bind to a target gene, but without cleaving the target gene (e.g., endogenous gene, such as FOX, SOX, GATA, MAF, bHLH, homeobox, TBX, EST etc.). In some cases, the nuclease can be a deactivated Cas (dCas). Instead, once the endonuclease identifies and binds the target gene, the transcriptional effector that is coupled (e.g., covalently or non-covalently coupled) to the endonuclease can interact with the target gene to either increase or decrease the expression level of the target gene, thereby either increasing or decreasing the activity level of the target gene. For example, the endonuclease and the transcriptional effector can be part of a fusion protein that is encoded by the same expression cassette.

[0140] FIG. 10 schematically illustrates use of the heterologous genetic circuit in conjunction with an endonuclease-transcriptional effector fusion (e.g., CRISPR Cas-transcriptional activator, such as Cas9-VPR). Each gate moiety can be a modified self-deactivating (e.g., self-destructing) guide RNA, which would be configured to form a complex with the CRISPR Cas-transcriptional effector fusion if not deactivated. The initial activating moiety (denoted as activating guide RNA or “aGuide”) can convert the first gate moiety to an activated guide RNA (denoted as a matureGuide). Each matureGuide can target an additional gene regulating moiety encoding an activatable guide RNA against a target gene (denoted as ramGuide), to activate such ranGuide. Subsequently, the activated ramGuide can form a complex with the CRISPR Cas-transcriptional effector fusion protein to bind the target gene and regulate expression level of the target gene. The activated matureGuide can also target an additional gate moiety that is downstream within the heterologous genetic circuit's signaling cascade, to subsequently regulate expression of one or more additional genes.

[0141] In some embodiments, the transcriptional effector can be a histone epigenetic modifier (or a histone modifier). In some cases, the histone epigenetic modifier can modulate histones through methylation (e.g., a histone methylation modifier, such as an amino acid methyltransferase, e.g., KRAB). In some cases, the histone epigenetic modifier can modulate histones through acetylation. In some cases, the histone epigenetic modifier can modulate histones through phosphorylation. In some cases, the histone epigenetic modifier can modulate histones through ADP-ribosylation. In some cases, the histone epigenetic modifier can modulate histones through glycosylation. In some cases, the histone epigenetic modifier can modulate histones through SUMOylation. In some cases, the histone epigenetic modifier can modulate histones through ubiquitination. In some cases, the histone epigenetic modifier can modulate histones by remodeling histone structure, e.g., via an ATP hydrolysis-dependent process.

[0142] In some embodiments, the transcriptional effector can be a gene epigenetic modifier (or a gene modifier). In some cases, a gene modifier can modulate genes through methylation (e.g., a gene methylation modifier, such as a DNA methyltransferase or DNMT). In some cases, a gene modifier can modulate genes through acetylation.

[0143] In some embodiments, the transcriptional effector can be derived from a family of related histone acetyltransferases. Non-limiting examples of histone acetyltransferases include GNAT subfamily, MYST subfamily, p300/CBP subfamily, HATI subfamily, GCN5, PCAF, Tip60, MOZ, MORF, MOF, HBO1, p300, CBP, HAT1, ATF-2, SRC1, and TAFII250.

[0144] In some embodiments, the transcriptional effector can be derived from a histone lysine methyltransferase. Non-limiting examples of histone lysine methyltransferases include EZH subfamily, Non-SET subfamily, Other SET subfamily, PRDM subfamily, SETI subfamily, SET2 subfamily, SUV39 subfamily, SYMD subfamily, ASH1L, EHMT1, EHMT2, EZH1, EZH2, MLL, MLL2, MLL3, MLL4, MLL5, NSD1, NSD2, NSD3, PRDM1, PRDM10, PRDM11, PRDM12, PRDM13, PRDM14, PRDM15, PRDM16, PRDM2, PRDM4, PRDM5, PRDM6, PRDM7, PRDM8, PRDM9, SET1, SET1L, SET2L, SETD2, SETD3, SETD4, SETD5, SETD6, SETD7, SETD8, SETDB1, SETDB2, SETMAR, SUV39H1, SUV39H2, SUV420H1, SUV420H2, SYMD1, SYMD2, SYMD3, SYMD4, and SYMD5.

[0145] Non-limiting examples of the transcriptional effector that enhances expression or activity of the target gene can include, but are not limited to, transcriptional activators such as VP16, VP64, VP48, VP160, p65 subdomain (e.g., from NFkB), vp64-p65-rta fusion protein (VPR), and activation domain of EDLL and/or TAL activation domain (e.g., for activity in plants); histone lysine methyltransferases such as SET1A, SET1B, MLL1 to 5, ASH1, SYMD2, NSD1; histone lysine demethylases such as JHDM2a/b, UTX, JMJD3; histone acetyltransferases such as GCN5, PCAF, CBP, p300, TAF1, TIP60/PLIP, MOZMYST3, MORFMYST4, SRC1, ACTR, PI 60, CLOCK; and DNA demethylases such as Ten-Eleven Translocation (TET) dioxygenase 1 (TETICD), TETI, DME, DML1, DML2, ROS1.

[0146] Non-limiting examples of the transcriptional effector that reduces expression or activity of the target gene can include, but are not limited to, transcriptional repressors such as the Kruppel associated box (KRAB or SKD); KOXI repression domain; the Mad mSIN3 interaction domain (SID); the ERF repressor domain (ERD), the SRDX repression domain (e.g, for repression in plants), and the like; histone lysine methyltransferases such as Pr-SET7/8, SUV4-20H1, RIZ1, and the like; histone lysine demethylases such as JMJD2A/JHDM3A, JMJD2B, JMJD2C/GASC1, JMJD2D, JARJD 1 A/RBP2, JARIDIB/PLU-1, JARID IC/SMCX, JARIDID/SMCY, and the like; histone lysine deacetylases such as HDAC1, HDAC2, HDAC3, HDAC8, HDAC4, HDAC5, HDAC7, HDAC9, SIRT1, SIRT2, HDAC11, and the like; DNA methylases such as Hhal DNA m5c-methyltransferase (M.Hhal), DNA methyltransferase 1 (DNMT1), DNA methyltransferase 3a (DNMT3a), DNA methyltransferase 3b (DNMT3b), METI, DRM3 (plants), ZMET2, CMT1, CMT2 (plants), and the like; and periphery recruitment elements such as Lamin A, Lamin B, and the like.

[0147] Various aspects of the present disclosure provide for a plurality of heterologous genetic circuits that are individually activatable to modulate expression and/or activity levels of a plurality of distinct target genes in a sequential manner. In some embodiments, a first heterologous genetic circuit is activated to convert a plurality of cells from a first cell type to a second cell type and, subsequently, a second heterologous genetic circuit is activated to convert the plurality of cells from the second cell type to a target cell type.

[0148] In some embodiments, the activation of the second genetic circuit can be performed immediately following the activation of the first heterologous genetic circuit. Alternatively, the activation of the second genetic circuit can be performed at least about 30 minutes, at least about 1 hour, at least about 2 hours, at least about 3 hours, at least about 4 hours, at least about 5 hours, at least about 6 hours, at least about 7 hours, at least about 8 hours, at least about 9 hours, at least about 10 hours, at least about 11 hours, at least about 12 hours, at least about 16 hours, at least about 20 hours, at least about 24 hours, at least about 2 days, at least about 3 days, at least about 4 days, at least about 5 days, at least about 6 days, at least about 7 days, at least about 2 weeks, at least about 3 weeks, at least about 4 weeks, at least about 2 months, at least about 3 months, at least about 4 months, at least about 5 months, at least about 6 months, at least about 1 year, or more subsequent to the activation of the first genetic circuit.

[0149] One or more target genes as disclosed herein can comprise one or more endogenous genes (e.g., genomic DNA, mRNA, mitochondrial DNA, etc.), exogenous genes, transgenes, or a combination thereof.

[0150] One or more target genes as disclosed herein can comprise a cell differentiation regulatory factor, a molecular function regulatory factor, a binding factor, a fusogenic factor, a protein folding chaperone, a protein tag, a RNA folding chaperone, a cell signaling factor, an immune response factor, a sensory receptor, a cell structural factor, a protein binding factor, a cargo receptor, a catalytic factor, or a small molecule sensor.

[0151] One or more target genes as disclosed herein can comprise a cell differentiation regulatory factor that comprises a growth factor, a transcription factor, a myogenic regulatory factor, an immune cell regulatory factor, a neuronal regulatory factor, a stem cell differentiation factor, an endocrine regulatory factor, a beta cell regulatory factor, a pancreatic lineage regulatory factor, a chondrogenic regulatory factor, an osteogenic regulatory factor, a senescence factor, a stemness factor (e.g., de-differentiation factor), etc.

[0152] In some cases, the one or more target genes (e.g., one or more pancreatic lineage regulatory factors) can comprise TBXT, FOXA2, SOX17, PDX1, GATA4, p53shRNA, HNF6, PTFIA, NGN3, NEUROG3, NKX6.1, SOX9, NKX2.2, MAFA, ONECUT1, NEUROD3, OCT4, NANOG, SOX2, CXCR4, HNF1β, INS, GCG, SST, and ISL1.

[0153] In some cases, the one or more target genes can comprise a homeobox gene. Homeobox genes are genes that regulate, for example, large-scale anatomical features in the early stages of embryonic development. Types of homeobox genes include HOX genes, LIM genes, PAX genes, POU genes, CERS genes, HNF genes, SINE genes, CUT genes, ZF genes, paraHOX genes, DLX genes, TALE genes, PRD genes, and NKL genes. Non-limiting examples of homeobox genes can include HOXA1, HOXA2, HOXA3, HOXA4, HOXA5, HOXA6, HOXA7, HOXA9, HOXA10, HOXA11, HOXA13, HOXB1, HOXB2, HOXB3, HOXB4, HOXB5, HOXB6, HOXB7, HOXB8, HOXB9, HOXB13, HOXC4, HOXC5, HOXC6, HOXC8, HOXC9, HOXC10, HOXC11, HOXC12, HOXC13, HOXD1, HOXD3, HOXD4, HOXD8, HOXD9, HOXD10, HOXD11, HOXD12, HOXD13, CDX1, CDX2, CDX4, GSX1, GSX2, PDX1, EVX1, EVX2, GBX1, GBX2, MEOX1, MEOX2, MNX1, DLX1, DLX2, DLX3, DLX4, DLX5, DLX6, IRX1, IRX2, IRX3, IRX4, IRX5, IRX6, MEIS1, MEIS2, MEIS3, MKX, PBX1, PBX2, PBX3, PBX4, PKNOX1, PKNOX2, TGIF1, TGIF2, TGIF2LX, TGIF2LY, ISL1, ISL2, LHX1, LHX2, LHX3, LHX4, LHX5, LHX6, LHX8, LHX9, LMX1A, LMX1B, HDX, POUIF1, POU2F1, POU2F2, POU2F3, POU3F1, POU3F2, POU3F3, POU3F4, POU4F1, POU4F2, POU4F3, POU5F1, POUSF1P1, POU5F1P4, POU5F2, POU6F1, POU6F2, LASS2, LASS3, LASS4, LASS5, LASS6, HMBOX1, HNF1A, HNF1B, SIX1, SIX2, SIX3, SIX4, SIX5, SIX6, ONECUT1, ONECUT2, ONECUT3, CUX1, CUX2, SATBI, SATB2, ADNP, ADNP2, TSHZ1, TSHZ2, TSHZ3, ZEB1, ZEB2, ZFHX2, ZFHX3, ZFHX4, ZHX1, HOMEZ, ALX1 (CART1), ALX3, ALX4, ARGFX, ARX, DMBX1, DPRX, DRGX, DUXA, DUXB, DUX (1, 2, 3, 4, 4c, 5), ESXI, GSC, GSC2, HESX1, HOPX, ISX, LEUTX, MIXL1, NOBOX, OTP, OTX1, OTX2, CRX, PAX2, PAX3, PAX4, PAX5, PAX6, PAX7, PAX8, PHOX2A, PHOX2B, PITX1, PITX2, PITX3, PROPI, PRRX1, PRRX2, RAX, RAX2, RHOXF1, RHOXF2/2B, SEBOX, SHOX, SHOX2, TPRX1, UNCX, VSX1, VSX2, BARHL1, BARHL2, BARX1, BARX2, BSX, DBX1, DBX2, EMX1, EMX2, EN1, EN2, HHEX, HLX1, LBX1, LBX2, MSX1, MSX2, NANOG, NOTO, TLX1, TLX2, TLX3, TSHZ1, TSHZ2, TSHZ3, VAX1, VAX2, VENTX, NKX2-1, NKX2-4, NKX2-2, NKX2-8, NKX3-1, NKX3-2, NKX2-3, NKX2-5, NKX2-6, HMX1, HMX2, HMX3, NKX6-1, NKX6-2, and NKX6-3.

[0154] In some cases, the target gene can comprise CDX1. CDX1 is a pahahox-class homeobox. CDX1 is a protein expressed in the developing endoderm and its expression persists in the intestine throughout adulthood.

[0155] In some cases, the target gene can comprise CDX2. CDX2 is a pahahox-class homeobox. CDX2 is a transcription factor expressed in the nuclei of intestinal epithelial cells, playing an essential role in the development and function of the digestive system.

[0156] In some cases, the target gene can comprise CDX4. CDX4 is a pahahox-class homeobox. CDX4 is a transcription factor that participates in the formation of embryonic tissues, anterior-posterior patterning and blood formation during embryogenesis.

[0157] In some cases, the target gene can comprise LMX1A. LMX1A is a protein that binds an A/T-rich sequence in the insulin promoter and stimulates transcription of insulin.

[0158] In some cases, the target gene can comprise LMX1B. LMX1B is a transcription factor that plays a central role in dorso-ventral patterning of the vertebrate limbs.

[0159] In some cases, the target gene can comprise GSX1. GSX1 is a pahahox-class homeobox. GSX1 is a transcription factor that plays a role in pituitary development.

[0160] In some cases, the target gene can comprise GSX2. GSX2 is a pahahox-class homeobox. GSX2 is a transcription factor that plays a role in brain development.

[0161] In some cases, the target gene can comprise PDX1. PDXI is a pahahox-class homeobox. PDX1 is necessary for pancreatic development, including beta cell maturation and duodenal differentiation.

[0162] In some cases, the target gene can comprise NKX6.1 (also called NKX6-1). NKX6.1 is a NKX-class homeobox. NKX6.1 is a bifunctional transcription regulator that is required for the development of beta cells.

[0163] In some cases, the target gene can comprise NKX2.2 (also called NKX2-2). NKX2.2 is a NKX-class homeobox. NKX2.2 is a transcription factor involved in the morphogenesis of the central nervous system.

[0164] In some cases, the target gene can comprise PAX6. PAX6 is a PRD-class homeobox. PAX6 is a transcription factor and is important in the development of eyes and other sensory organs, certain neural and epidermal tissues as well as other structures derived from ectodermal tissues.

[0165] In some cases, the target gene can comprise ONECUT1. ONECUT1 is a CUT-class homeobox. ONCECUT1 is a transcription factor enriched in the liver, where it stimulates transcription of liver-expressed genes.

[0166] In some cases, the target gene can comprise ISL1. ISL1 is a LIM-class homeobox. ISL1 is a transcription factor that plays an important role in the formation of pancreatic islets of Langerhans.

[0167] In some cases, the one or more target genes can comprise T-box transcription factors (TBX genes). TBX transcription factors are involved in development. T-box proteins have relatively large DNA-binding domains. Non-limiting examples of TBX transcription factors can include TBX1, TBX2, TBX3, TBX4, TBX5, TBX6, TBX10, TBX15, TBX18, TBX19, TBX20, TBX21, TBX22, and TBXT (Brachyury protein).

[0168] In some cases, the target gene can comprise TBXT. TBXT, also known as T-box transcription factor T or brachyury protein, functions as a transcription factor in the T-box family of genes. TBXT has a role in defining the midline of a bilateral organism, helping to establish the anterior-posterior axis. It can also assist in defining the mesoderm during gastrulation.

[0169] In some cases, the one or more target genes can comprise a basic helix-loop-helix transcription factor (bHLH gene). bHLH transcription factors are involved in the regulation of the cell cycle and many other developmental processes. bHLH proteins have a basic helix-loop-helix protein structure. Non-limiting examples of bHLH transcription factors can include AHR, AHRR, ARNT, ARNT2, ARNTL, ARNTL2, ASCLI, ASCL2, ASCL3, ASCL4, ATOH1, ATOH7, ATOH8, BHLHB2, BHLHB3, BHLHB4, BHLHB5, BHLHB8, CLOCK, EPAS1, FERD3L, FIGLA, HAND1, HAND2, HES1, HES2, HES3, HES4, HES5, HES6, HES7, HEY1, HEY2, HIF1A, ID1, ID2, ID3, ID4, KIAA2018, LYL1, MASH1, MATH2, MAX, MESP1, MESP2, MIST1, MITF, MLX, MLXIP, MLXIPL, MNT, MSC, MSGNI, MXD1, MXD3, MXD4, MXI1, MYC, MYCL1, MYCL2, MYCN, MYF5, MYF6, MYOD1, MYOG, NCOA1, NCOA3, NEUROD1, NEUROD2, NEUROD4, NEUROD6, NEUROG1, NEUROG2, NEUROG3, NHLH1, NHLH2, NPAS1, NPAS2, NPAS3, NPAS4, OAF1, OLIG1, OLIG2, OLIG3, PTF1A, SCL, SCXB, SIM1, SIM2, SOHLH1, SOHLH2, SREBF1, SREBF2, TALI, TAL2, TCF12, TCF15, TCF21, TCF3, TCF4, TCFL5, TFAP4, TFE3, TFEB, TFEC, TWIST1, TWIST2, USF1, and USF2.

[0170] In some cases, the target gene can comprise NEUROG3. NEUROG3, or neurogenin 3 is a endocrine transcription factor that activates gene transcription in endocrine progenitor cells. NEUROG3 is important for pancreatic islet differentiation and regeneration and functions to directly enhance the expression of the lineage-committed transcription factors required for the differentiation of the endocrine progenitor cells into each of the endocrine cell subtypes.

[0171] In some cases, the target gene can comprise NEUROD1. NEUROD1 is a transcription factor that regulates expression of the insulin gene.

[0172] In some cases, the target gene can comprise PTF1a. PTF1a is a transcription factor that plays a role in pancreatic development.

[0173] In some cases, the one or more target genes can comprise a SRY-related box transcription factor (SOX gene). SOX transcription factors are involved in developmental regulation. Non-limiting examples of SOX transcription factors can include SOX1, SOX2, SOX3, SOX4, SOX5, SOX6, SOX7, SOX8, SOX9, SOX10, SOX11, SOX12, SOX13, SOX14, SOX15, SOX17, SOX18, SOX21, SOX30, and SRY.

[0174] In some cases, the one or more target genes can comprise SOX group A, comprising SRY. In some cases, the one or more target genes can comprise SOX group B1, comprising SOX1, SOX2 and/or SOX3. In some cases, the one or more target genes can comprise SOX group B2, comprising SOX14 and/or SOX21. In some cases, the one or more target genes can comprise SOX group C, comprising SOX4, SOX11 and/or SOX12. In some cases, the one or more target genes can comprise SOX group D, comprising SOX5, SOX6, and/or SOX13. In some cases, the one or more target genes can comprise SOX group E, comprising SOX8, SOX9, and/or SOX10. In some cases, the one or more target genes can comprise SOX group F, comprising SOX7, SOX 17, and/or SOX18. In some cases, the one or more target genes can comprise SOX group G, comprising SOX15. In some cases, the one or more target genes can comprise SOX group H, comprising SOX30.

[0175] In some cases, the target gene can comprise SOX17. SOX17 is a transcription factor which is involved in the regulation of vertebrate embryonic development and in the determination of endodermal cell fate.

[0176] In some cases, the target gene can comprise SOX9. SOX9 is a transcription factor which acts during cell differentiation and regulates transcription of the anti-Muellerian hormone (AMH) gene.

[0177] In some cases, the one or more target genes can comprise a forkhead box (FOX). FOX are transcription factors that play a role in regulating the expression of genes involved in cell growth, proliferation, differentiation, and longevity. Some FOX genes can bind chromatin during cell differentiation processes. Non-limiting examples of FOX genes can include FOXA, FOXB, FOXC, FOXD, FOXE, FOXF, FOXG, FOXH, FOXI, FOXJ, FOXK, FOXL, FOXM, FOXN, FOXO, FOXP, FOXQ, FOXR, and FOXS.

[0178] In some cases, the target gene can comprise FOXA1. FOXAI is a transcriptional activator for liver-specific transcripts.

[0179] In some cases, the target gene can comprise FOXA2. FOXA2 is a transcription factor that plays an important role during development, in mature tissues and, when dysregulated or mutated, also in cancer.

[0180] In some cases, the target gene can comprise FOXA3. FOXA3 is a transcriptional activator for liver-specific transcripts.

[0181] In some cases, the one or more target genes can comprise an erythroblast transformation specific (ETS) gene. ETS are transcription factors unique to animals and are implicated in tissue development. Non-limiting examples of ETS genes can include ELF1, ELF2 (NERF) ELF4 (MEF) GABPa, ERG, FLI1, FEV, ERF (PE2), ETV3 (PE1), ELF3 (ESE1/ESX), ELF5 (ESE2), ESE3 (EHF), ETS1, ETS2, SPDEF (PDEF/PSE), ETV4 (PEA3/E1AF), ETV5 (ERM), ETV1 (ER81), ETV2 (ER71), SPI1 (PU.1), SPIB, SPIC, ELK1, ELK4 (SAP1), ELK3 (NET/SAP2), ETV6 (TEL), and ETV7 (TEL2).

[0182] In some cases the target gene can comprise ERG. ERG is transcriptional regulator that also functions as an oncogene.

[0183] In some cases the target gene can comprise FLI1. FLII is a transcription factor which is a proto-oncogene and is involved in proliferation and terminal differentiation.

[0184] In some cases the target gene can comprise FEV. FEV is a transcriptional repressor.

[0185] In some cases, the one or more target genes can comprise a GATA gene. GATA genes are transcription factors characterized by their ability to bind to the DNA sequence “GATA.” Non-limiting examples of GATA genes can include GATA1, GATA2, GATA3, GATA4, GATA5, and GATA6.

[0186] In some cases, the target gene can comprise GATA4. GATA4 is a zinc finger transcription factor that regulates genes involved in embryogenesis and in myocardial differentiation and function.

[0187] In some cases, the one or more target genes can comprise a MAF transcription factor. MAF is an oncogene which is involved in immune cell differentiation.

[0188] In some cases, use of the heterologous genetic circuit as disclosed herein can be used to differentiate endodermal stem cells into pancreatic lineage cells whereby at least about 5%, at least about 6%, at least about 7%, at least about 8%, at least about 9%, at least about 10%, at least about 20%, at least about 30%, at least about 40%, at least about 50%, at least about 60%, at least about 70%, at least about 80%, at least about 90%, or at least about 100% of the resulting cells generated by using the heterologous genetic circuit as disclosed herein are the target cell type.

[0189] In some cases, use of the heterologous genetic circuit as disclosed herein can be used to differentiate endodermal stem cells into pancreatic lineage cells, e.g., in absence of one, two, or all of feeder cells, serum, and exogenous growth factors. Using the heterologous genetic circuit as disclosed herein can generate at least about 1×10⁴, at least about 2×10⁴, at least about 5×10⁴, at least about 1×10⁵, at least about 2×10⁵, at least about 5×10⁵, at least about 1×10⁶, at least about 2×10⁶, at least about 5×10⁶, at least about 1×10⁷, at least about 2×10⁷, at least about 5×10⁷, at least about 1×10⁸, at least about 2×10⁸, at least about 5×10⁸, at least about 1×10⁹, at least about 2×10⁹, at least about 5×10⁹, at least about 1×10¹⁰, at least about 2×10¹⁰, at least about 5×10¹⁰, at least about 1×10¹⁵ at least about 2×10¹⁵, at least about 5×10¹⁵, or more beta cells from at most about 1×10⁶, at most about 9×10⁵, at most about 8×10⁵, at most about 7×10⁵, at most about 6×10⁵, at most about 5×10⁵, at most about 4×10⁵, at most about 3×10⁵, at most about 2×10⁵, at most about 1×10⁵, at most about 5×10⁴, at most about 2×10⁴, at most about 1×10⁴, or more pancreatic lineage cells.

[0190] In some cases, use of the heterologous genetic circuit as disclosed herein can be used to differentiate pluripotent stem cells (PSCs, such as induced PSCs or iPSCs) into beta cells, e.g., in absence of one, two, or all of feeder cells, serum, and exogenous growth factors. Using the heterologous genetic circuit as disclosed herein can generate at least about 1×10⁴, at least about 2×10⁴, at least about 5×10⁴, at least about 1×10⁵, at least about 2×10⁵, at least about 5×10⁵, at least about 1×10⁶, at least about 2×10⁶, at least about 5×10⁶, at least about 1×10⁷, at least about 2×10⁷, at least about 5×10⁷, at least about 1×10⁸, at least about 2×10⁸, at least about 5×10⁸, at least about 1×10⁹, at least about 2×10⁹, at least about 5×10⁹, at least about 1×10¹⁰, at least about 2×10¹⁰, at least about 5×10¹⁰, at least about 1×10¹⁵, at least about 2×10¹⁵, at least about 5×10¹⁵, or more beta cells from at most about 1×10⁶, at most about 9×10⁵, at most about 8×10⁵, at most about 7×10⁵, at most about 6×10⁵, at most about 5×10⁵, at most about 4×10⁵, at most about 3×10⁵, at most about 2×10⁵, at most about 1×10⁵, at most about 5×10⁴, at most about 2×10⁴, at most about 1×10⁴, or more pancreatic lineage cells.

[0191] Such generation of beta cells by using the heterologous genetic circuit as disclosed herein can be achieved within the span of at most about 60 days, at most about 55 days, at most about 50 days, at most about 45 days, at most about 40 days, at most about 35 days, at most about 30 days, at most about 25 days, at most about 20 days, at most about 15 days, at most about 10 days, at most about 7 days, at most about 6 days, at most about 5 days, at most about 4 days, at most about 3 days, at most about 2 days, at most about 1 day, or less.

[0192] In some cases, the beta cells generated through this method produce more insulin as compared to beta cells obtained via directed differentiation. The beta cells generated using the provided methods can produce at least about 5%, at least about 10%, at least about 15%, at least about 20%, at least about 25%, at least about 30%, at least about 35%, at least about 40%, at least about 45%, at least about 50%, at least about 55%, at least about 60%, at least about 65%, at least about 70%, at least about 75%, at least about 80%, at least about 85%, at least about 90%, at least about 95%, at least about 100%, at least about 120%, at least about 150%, or at least about 200% more insulin than beta cells obtained via directed differentiation. Alternatively, or in addition to, the beta cells generated through this method may produce an equivalent amount of insulin as compared to beta cells obtained via directed differentiation.

[0193] In some cases, the beta cells or pancreatic lineage cells generated through this method exhibit higher expression levels of two or more positive pancreatic lineage cell markers as compared to control pancreatic lineage cells. Non-limiting examples of positive pancreatic lineage cell markers can include EpCam, ECAD, CD142, and CD49a.

[0194] In some cases, the beta cells or pancreatic lineage cells generated through this method exhibit at least about 0.1%, at least about 0.2%, at least about 0.3%, at least about 0.4%, at least about 0.5%, at least about 0.6%, at least about 0.7%, at least about 0.8%, at least about 0.9%, at least about 1%, at least about 2%, at least about 3%, at least about 4%, at least about 5%, at least about 6%, at least about 7%, at least about 8%, at least about 9%, at least about 10%, at least about 20%, at least about 30%, at least about 40%, at least about 50%, at least about 60%, at least about 70%, at least about 80%, at least about 90%, at least about 100%, at least about 200%, at least about 300%, at least about 400%, at least about 500%, at least about 600%, at least about 700%, at least about 800%, at least about 900%, at least about 1,000%, at least about 2,000%, at least about 3,000%, at least about 4,000%, at least about 5,000%, at least about 6,000%, at least about 7,000%, at least about 8,000%, at least about 9,000%, at least about 10,000%, at least about 100,000%, or at least about 1,000,000% higher expression levels of positive pancreatic lineage cell markers as compared to control pancreatic lineage cells.

[0195] In some cases, the beta cells or pancreatic lineage cells generated through this method exhibit at least or up to about 0.1-fold, at least or up to about 0.2-fold, at least or up to about 0.3-fold, at least or up to about 0.4-fold, at least or up to about 0.5-fold, at least or up to about 0.6-fold, at least or up to about 0.7-fold, at least or up to about 0.8-fold, at least or up to about 0.9-fold, at least or up to about 1-fold, at least or up to about 2-fold, at least or up to about 3-fold, at least or up to about 4-fold, at least or up to about 5-fold, at least or up to about 6-fold, at least or up to about 7-fold, at least or up to about 8-fold, at least or up to about 9-fold, at least or up to about 10-fold, at least or up to about 20-fold, at least or up to about 30-fold, at least or up to about 40-fold, at least or up to about 50-fold, at least or up to about 60-fold, at least or up to about 70-fold, at least or up to about 80-fold, at least or up to about 90-fold, at least or up to about 100-fold, at least or up to about 500-fold, at least or up to about 1,000-fold, at least or up to about 5,000-fold, or at least or up to about 10,000-fold higher expression levels of positive pancreatic lineage cell markers as compared to control pancreatic lineage cells.

[0196] In some cases, the beta cells or pancreatic lineage cells generated through this method exhibit higher expression levels of two or more negative pancreatic lineage cell markers as compared to control pancreatic lineage cells. Non-limiting examples of negative pancreatic lineage cell markers can include CD49.

[0197] In some cases, the beta cells or pancreatic lineage cells generated through this method exhibit at least about 0.1%, at least about 0.2%, at least about 0.3%, at least about 0.4%, at least about 0.5%, at least about 0.6%, at least about 0.7%, at least about 0.8%, at least about 0.9%, at least about 1%, at least about 2%, at least about 3%, at least about 4%, at least about 5%, at least about 6%, at least about 7%, at least about 8%, at least about 9%, at least about 10%, at least about 20%, at least about 30%, at least about 40%, at least about 50%, at least about 60%, at least about 70%, at least about 80%, at least about 90%, at least about 100%, at least about 200%, at least about 300%, at least about 400%, at least about 500%, at least about 600%, at least about 700%, at least about 800%, at least about 900%, at least about 1,000%, at least about 2,000%, at least about 3,000%, at least about 4,000%, at least about 5,000%, at least about 6,000%, at least about 7,000%, at least about 8,000%, at least about 9,000%, at least about 10,000%, at least about 100,000%, or at least about 1,000,000% lower expression levels of negative pancreatic lineage cell markers as compared to control pancreatic lineage cells.

[0198] In some cases, the beta cells or pancreatic lineage cells generated through this method exhibit at least or up to about 0.1-fold, at least or up to about 0.2-fold, at least or up to about 0.3-fold, at least or up to about 0.4-fold, at least or up to about 0.5-fold, at least or up to about 0.6-fold, at least or up to about 0.7-fold, at least or up to about 0.8-fold, at least or up to about 0.9-fold, at least or up to about 1-fold, at least or up to about 2-fold, at least or up to about 3-fold, at least or up to about 4-fold, at least or up to about 5-fold, at least or up to about 6-fold, at least or up to about 7-fold, at least or up to about 8-fold, at least or up to about 9-fold, at least or up to about 10-fold, at least or up to about 20-fold, at least or up to about 30-fold, at least or up to about 40-fold, at least or up to about 50-fold, at least or up to about 60-fold, at least or up to about 70-fold, at least or up to about 80-fold, at least or up to about 90-fold, at least or up to about 100-fold, at least or up to about 500-fold, at least or up to about 1,000-fold, at least or up to about 5,000-fold, or at least or up to about 10,000-fold lower expression levels of negative pancreatic lineage cell markers as compared to control pancreatic lineage cells.

[0199] In some cases, expression levels of pancreatic lineage cell markers can be measured using methods such as, but not limited to, RT-PCR, Western blotting, Northern blotting, protein staining, mRNA staining, and RNA-sequencing.

[0200] In some cases, expression levels can be measured at least about 12 hours, at least about 13 hours, at least about 14 hours, at least about 15 hours, at least about 16 hours, at least about 17 hours, at least about 18 hours, at least about 19 hours, at least about 20 hours, at least about 21 hours, at least about 22 hours, at least about 23 hours, at least about 24 hours, at least about 28 hours, at least about 32 hours, at least about 36 hours, at least about 40 hours, at least about 44 hours, at least about 48 hours, at least about 3 days, at least about 4 days, at least about 5 days, at least about 6 days, at least about 7 days, at least about 8 days, at least about 9 days, at least about 10 days, at least about 11 days, at least about 12 days, at least about 13 days, at least about 14 days or more days after the introduction of a genetic circuit.

[0201] In some cases, the beta cells or pancreatic lineage cells generated through this method can be immature beta cells. Alternatively, beta cells or pancreatic lineage cells generated through this method can be mature beta cells. In some cases, the progenitor cells generated can be substantially mitotically dormant. Alternatively, the progenitor cells generated can be substantially mitotically active.

[0202] In some cases, a first gate unit can be configured to reduce expression and/or activity levels of one or more target genes. In some cases, a first gate unit can be configured to enhance expression and/or activity levels of one or more target genes. In some cases, a first gate unit can be configured to maintain expression and/or activity levels of one or more target genes.

[0203] In some cases, modulation of a first target gene can occur prior to modulation of a second target gene. In some cases, modulation of a first target gene can occur subsequent to modulation of a second target gene. In some cases, modulation of a first target gene can occur at about the same time as modulation of a second target gene.

[0204] In some cases, modulation of a target gene comprises increasing the expression level of the second target gene. Alternatively, modulation of a target gene can comprise reducing the expression level of the second target gene. Alternatively, modulation of a target gene can comprise maintaining the expression level of the second target gene.

[0205] In some cases, use of the heterologous genetic circuit can induce cells to differentiate into the cell type of interest in absence of growth factors, serum (fetal bovine serum, human serum AB, etc.), or other exogenous cell differentiation regulatory factors or mediums. Serum can comprise liquid fractions of clotted blood, including nutritional and macromolecular factors essential for cell growth.

[0206] Alternatively, use of the heterologous genetic circuit can induce cells to differentiate into the cell type of interest using a reduced amount of serum and/or growth factors (e.g., reduced by at least about 1%, at least about 2%, at least about 3%, at least about 4%, at least about 5%, at least about 6%, at least about 7%, at least about 8%, at least about 9%, at least about 10%, at least about 15%, at least about 20%, at least about 30%, at least about 40%, at least about 50%, at least about 60%, at least about 70%, at least about 80%, at least about 90%, at least about 91%, at least about 92%, at least about 93%, at least about 94%, at least about 95%, at least about 96%, at least about 97%, at least about 98%, at least about 99%, or substantially free of serum). Reduced amounts of serum can allow for more consistency across experiments or batches of cells, increased growth and/or productivity of differentiated cells, better control over physiological responsiveness, and reduced risk around contamination by serum-born agents in cell culture.

[0207] In some cases, use of the heterologous genetic circuit in the stem cells (e.g., iSPCs, endodermal stem cells) can induce the endodermal stem cells to differentiate into pancreatic lineage cells (e.g., beta cells) in absence of growth factors, serum (fetal bovine serum, human serum AB, etc.), or other exogenous cell differentiation regulatory factors or mediums. In some cases, use of the heterologous genetic circuit as disclosed herein can be used to differentiate the stem cells into beta cells in the absence of one or both growth factors and serum. The resulting beta cells generated by using the heterologous genetic circuit as disclosed herein are at least about 5%, at least about 6%, at least about 7%, at least about 8%, at least about 9%, at least about 10%, at least about 15%, at least about 20%, at least about 30%, at least about 40%, at least about 50%, at least about 60%, at least about 70%, at least about 80%, at least about 90% or at least about 100% of the total resultant cell population.

[0208] In some cases, conversion from one cell type (e.g., PSCs, endodermal stem cells or pancreatic lineage cells) to another cell type (e.g., beta cells) using a heterologous genetic circuit can result in the target cell type. Alternatively, conversion from one cell type (e.g., PSCs, endodermal stem cells or pancreatic lineage cells) to another cell type (e.g., beta cells) using a heterologous genetic circuit can result in an intermediate cell type. An intermediate cell type can undergo a second conversion using a second genetic circuit to result in the target cell type.

[0209] The conversion of a cell from one cell type to another can comprise the regulation of a plurality of target genes. For example, the conversion can comprise the regulation of at least about 1, at least about 2, at least about 3, at least about 4, at least about 5, at least about 6, at least about 7, at least about 8, at least about 9, at least about 10, at least about 15, at least about 20, at least about 30, at least about 40, at least about 50, or more target genes. The conversion can comprise the regulation of at most about 50, at most about 40, at most about 30, at most about 20, at most about 15, at most about 10, at most about 9, at most about 8, at most about 7, at most about 6, at most about 5, at most about 4, at most about 3, at most about 2, or at most about 1 target gene(s). Each gene that is disclosed herein can be subjected to at least about 1, at least about 2, at least about 3, at least about 4, at least about 5, at least about 6, at least about 7, at least about 8, at least about 9, at least about 10, at least about 15, at least about 20, at least about 30, at least about 40, at least about 50, or more modulations. Each gene that is disclosed herein can be subjected to at most about 50, at most about 40, at most about 30, at most about 20, at most about 15, at most about 10, at most about 9, at most about 8, at most about 7, at most about 6, at most about 5, at most about 4, at most about 3, at most about 2, or at most about 1 modulation(s). One or more modulations of a target gene (e.g., an endogenous gene), as induced by the heterologous genetic circuit of the present disclosure, may be an artificial modulation (or a heterologous modulation) that may otherwise not occur in the cell in absence of (i) the heterologous genetic circuit and/or (ii) the activating moiety of the heterologous genetic circuit.

[0210] As demonstrated in FIG. 3, various heterologous genetic circuits can be designed to modulate expression or activity levels of a plurality of genes (e.g., a plurality of endogenous genes) in a cell over a plurality of different time points.

[0211] For example, a heterologous genetic circuit can be designed to (i) modulate expression levels of a first gene and (ii) subsequently modulate expression levels of a second gene. For example, a heterologous genetic circuit can be designed to (i) activate expression levels of a first gene and (ii) subsequently activate expression levels of a second gene. Alternatively, a heterologous genetic circuit can be designed to (i) activate expression levels of a first gene and (ii) subsequently reduce expression levels of a second gene. Alternatively, a heterologous genetic circuit can be designed to (i) reduce expression levels of a first gene and (ii) subsequently activate expression levels of a second gene. Alternatively, a heterologous genetic circuit can be designed to (i) reduce expression levels of a first gene and (ii) subsequently reduce expression levels of a second gene. The first gene and the second gene can be the same gene. Alternatively, the first gene and the second gene can be different genes. A heterologous genetic circuit can be designed to modulate the expression levels of an additional gene. A heterologous genetic circuit can be designed to include at least 1, at least 2, at least 3, at least 4, at least 5, at least 6, at least 7, at least 8, at least 9 at least 10, or more additional genes. An additional gene can be activated. Alternatively, an additional gene can be reduced. A heterologous genetic circuit can be designed to modulate expression of the additional gene prior to modulation of expression levels of both the first gene and the second gene. Alternatively or in addition to, a heterologous genetic circuit can be designed to modulate expression of the additional gene subsequent to modulation of expression levels of the first gene and prior to modulation of expression levels of the second gene. Alternatively or in addition to, a heterologous genetic circuit can be designed to modulate expression of the additional gene subsequent to modulation of expression levels of both the first gene and the second gene.

[0212] A heterologous genetic circuit can be designed to include a first member that is a FOX, SOX and/or a GATA and a second member that is a bHLH, a homeobox, and/or a MAF. A heterologous genetic circuit can be designed to include a FOX and a bHLH. A heterologous genetic circuit can be designed to include FOX and a homeobox. A heterologous genetic circuit can be designed to include a FOX and a MAF. A heterologous genetic circuit can be designed to include a SOX and bHLH. A heterologous genetic circuit can be designed to include a SOX and a homeobox. A heterologous genetic circuit can be designed to include a SOX and a MAF. A heterologous genetic circuit can be designed to include a GATA and a bHLH. A heterologous genetic circuit can be designed to include a GATA and a homeobox. A heterologous genetic circuit can be designed to include a GATA and a MAF.

[0213] Activating a heterologous genetic circuit in a cell as disclosed herein can modulate expression or activity levels of a plurality of genes over a plurality of different time points, to effect conversion of the cell into a different cell type (e.g., stem cells into tissue-specific progenitor cells, etc.). A rate of such cell type conversion by use of the heterologous genetic circuit can be greater than a rate of the cell type conversion by use of the control heterologous genetic circuit (e.g., for simultaneous activation of multiple target genes) by at least or up to about 1 percent (%), at least or up to about 2%, at least or up to about 5%, at least or up to about 10%, at least or up to about 15%, at least or up to about 20%, at least or up to about 25%, at least or up to about 30%, at least or up to about 35%, at least or up to about 40%, at least or up to about 45%, at least or up to about 50%, at least or up to about 60%, at least or up to about 70%, at least or up to about 80%, at least or up to about 90%, or at least or up to about 95%.

[0214] Activating a heterologous genetic circuit in a cell as disclosed herein can modulate expression or activity levels of a plurality of genes over a plurality of different time points, to effect conversion of the cell into a different cell type (e.g., stem cells into tissue-specific progenitor cells, etc.). The conversion of the cell into a different cell type can occur in less than about 20 days, less than about 19 days, less than about 18 days, less than about 17 days, less than about 16 days, less than about 15 days, less than about 14 days, less than about 13 days, less than about 12 days, less than about 11 days, less than about 10 days, less than about 9 days, less than about 8 days, less than about 7 days, less than about 6 days, less than about 5 days, less than about 4 days, less than about 3 days, less than about 2 days, or less than about 1 day.

[0215] A cell (e.g., an initial cell to be modified into the engineered cell as disclosed herein, a final cell product generated from the engineered cell as disclosed herein, etc.) can comprise a muscle cell, an immune cell, a neuron, an osteoblast, an endothelial cell, an mesenchymal cell, an epithelial cell, a stem cell, an secretory cell, a blood cell, a germ cell, a nurse cell, a storage cell, an enteroendocrine cell, a pituitary cell, a mesoderm cell, an endoderm cell, a pancreatic lineage cell, a neurosecretory cell, a duct cell, an odontoblast, a cementoblast, a glial cell, or an interstitial cell.

[0216] Non-limiting examples of such cell can include lymphoid cells, such as B cell, T cell (Cytotoxic T cell, Natural Killer T cell, Regulatory T cell, T helper cell), Natural killer cell, cytokine induced killer (CIK) cells (see e.g. US20080241194); myeloid cells, such as granulocytes (Basophil granulocyte, Eosinophil granulocyte, Neutrophil granulocyte/Hypersegmented neutrophil), Monocyte/Macrophage, Red blood cell (Reticulocyte), Mast cell, Thrombocyte/Megakaryocyte, Dendritic cell; cells from the endocrine system, including thyroid (Thyroid epithelial cell, Parafollicular cell), parathyroid (Parathyroid chief cell, Oxyphil cell), adrenal (Chromaffin cell), pineal (Pinealocyte) cells; cells of the nervous system, including glial cells (Astrocyte, Microglia), Magnocellular neurosecretory cell, Stellate cell, Boettcher cell, and pituitary (Gonadotrope, Corticotrope, Thyrotrope, Somatotrope, Lactotroph); cells of the Respiratory system, including Pneumocyte (Type I pneumocyte, Type II pneumocyte), Clara cell, Goblet cell, Dust cell; cells of the circulatory system, including Myocardiocyte, Pericyte; cells of the digestive system, including stomach (Gastric chief cell, Parietal cell), Goblet cell, Paneth cell, G cells, D cells, ECL cells, I cells, K cells, S cells; enteroendocrine cells, including enterochromaffm cell, APUD cell, liver (Hepatocyte, Kupffer cell), Cartilage/bone/muscle; bone cells, including Osteoblast, Osteocyte, Osteoclast, teeth (Cementoblast, Ameloblast); paraxial mesoderm cells cartilage cells, including sclerotome cells, Chondroblasts, or Chondrocytes, skin cells, including Trichocyte, Keratinocyte, Melanocyte (Nevus cell); muscle cells, including Myocyte; urinary system cells, including Podocyte, Juxtaglomerular cell, Intraglomerular mesangial cell/Extraglomerular mesangial cell, Kidney proximal tubule brush border cell, Macula densa cell; reproductive system cells, including Spermatozoon, Sertoli cell, Leydig cell, Ovum; and other cells, including Adipocyte, Fibroblast, Tendon cell, Epidermal keratinocyte (differentiating epidermal cell), Epidermal basal cell (stem cell), Keratinocyte of fingernails and toenails, Nail bed basal cell (stem cell), Medullary hair shaft cell, Cortical hair shaft cell, Cuticular hair shaft cell, Cuticular hair root sheath cell, Hair root sheath cell of Huxley's layer, Hair root sheath cell of Henle's layer, External hair root sheath cell, Hair matrix cell (stem cell), Wet stratified barrier epithelial cells, Surface epithelial cell of stratified squamous epithelium of cornea, tongue, oral cavity, esophagus, anal canal, distal urethra and vagina, basal cell (stem cell) of epithelia of cornea, tongue, oral cavity, esophagus, anal canal, distal urethra and vagina, Urinary epithelium cell (lining urinary bladder and urinary ducts), Exocrine secretory epithelial cells, Salivary gland mucous cell (polysaccharide-rich secretion), Salivary gland serous cell (glycoprotein enzyme-rich secretion), Von Ebner's gland cell in tongue (washes taste buds), Mammary gland cell (milk secretion), Lacrimal gland cell (tear secretion), Ceruminous gland cell in ear (wax secretion), Eccrine sweat gland dark cell (glycoprotein secretion), Eccrine sweat gland clear cell (small molecule secretion). Apocrine sweat gland cell (odoriferous secretion, sex-hormone sensitive), Gland of Moll cell in eyelid (specialized sweat gland), Sebaceous gland cell (lipid-rich sebum secretion), Bowman's gland cell in nose (washes olfactory epithelium), Brunner's gland cell in duodenum (enzymes and alkaline mucus), Seminal vesicle cell (secretes seminal fluid components, including fructose for swimming sperm), Prostate gland cell (secretes seminal fluid components), Bulbourethral gland cell (mucus secretion), Bartholin's gland cell (vaginal lubricant secretion), Gland of Littre cell (mucus secretion), Uterus endometrium cell (carbohydrate secretion), Isolated goblet cell of respiratory and digestive tracts (mucus secretion), Stomach lining mucous cell (mucus secretion), Gastric gland zymogenic cell (pepsinogen secretion), Gastric gland oxyntic cell (hydrochloric acid secretion), Pancreatic acinar cell (bicarbonate and digestive enzyme secretion), Paneth cell of small intestine (lysozyme secretion), Type II pneumocyte of lung (surfactant secretion), Clara cell of lung, Hormone secreting cells, Anterior pituitary cells, Somatotropes, Lactotropes, Thyrotropes, Gonadotropes, Corticotropes, Intermediate pituitary cell, Magnocellular neurosecretory cells, Gut and respiratory tract cells, Thyroid gland cells, thyroid epithelial cell, parafollicular cell, Parathyroid gland cells, Parathyroid chief cell, Oxyphil cell, Adrenal gland cells, chromaffin cells, Ley dig cell of testes, Theca interna cell of ovarian follicle, Corpus luteum cell of ruptured ovarian follicle, Granulosa lutein cells, Theca lutein cells, Juxtaglomerular cell (renin secretion), Macula densa cell of kidney, Metabolism and storage cells, Barrier function cells (Lung, Gut, Exocrine Glands and Urogenital Tract), Kidney, immature beta cells, mature beta cells, Type I pneumocyte (lining air space of lung), Pancreatic duct cell (centroacinar cell), Nonstriated duct cell (of sweat gland, salivary gland, mammary gland, etc.), Duct cell (of seminal vesicle, prostate gland, etc.), Epithelial cells lining closed internal body cavities, Ciliated cells with propulsive function, Extracellular matrix secretion cells, Contractile cells; Skeletal muscle cells, stem cell, Heart muscle cells, Blood and immune system cells, Erythrocyte (red blood cell), Megakaryocyte (platelet precursor), Monocyte, Connective tissue macrophage (various types), Epidermal Langerhans cell, Osteoclast (in bone), Dendritic cell (in lymphoid tissues), Microglial cell (in central nervous system), Neutrophil granulocyte, Eosinophil granulocyte, Basophil granulocyte, Mast cell, Helper T cell, Suppressor T cell, Cytotoxic T cell, Natural Killer T cell, B cell, Natural killer cell, Reticulocyte, Stem cells and committed progenitors for the blood and immune system (various types), Pluripotent stem cells, Totipotent stem cells, Induced pluripotent stem cells, adult stem cells, Sensory transducer cells, Autonomic neuron cells, Sense organ and peripheral neuron supporting cells, Central nervous system neurons and glial cells, Lens cells, Pigment cells, Melanocyte, Retinal pigmented epithelial cell, Germ cells, Oogonium/Oocyte, Spermatid, Spermatocyte, Spermatogonium cell (stem cell for spermatocyte), Spermatozoon, Nurse cells, Ovarian follicle cell, Sertoli cell (in testis), Thymus epithelial cell, Interstitial cells, and Interstitial kidney cells.

[0217] In an aspect, the present disclosure provides for systems and methods that can convert a plurality of pluripotent stem cells (PSCs) into a plurality of tissue-specific progenitor cells.

[0218] A pluripotent stem cell can comprise an induced pluripotent stem cell (iPSC), or an embryonic stem cell (ESC). A tissue-specific progenitor cells can comprise an endodermal stem cell, a hematopoietic stem cell (HSC), a myeloid progenitor cell, a muscle stem cell, a pancreatic lineage cell, a neural stem cell, an epithelial stem cell, an epidermal stem cell, a mammary stem cell, an intestinal stem cell, a neural crest stem cell, or a testicular stem cell.

[0219] In some cases, the tissue-specific progenitor cells or tissue-specific cells generated as disclosed herein may be derived from isolated mesenchymal stem cells (MSCs) (e.g., isolated from bone marrow of a subject). Alternatively, in some cases, the tissue-specific progenitor cells or tissue-specific cells generated as disclosed herein may not be derived from isolated MSCs.

[0220] In some cases, conversion of stem cells to tissue-specific progenitor cells is characterized by producing fewer non-endodermal cells or fewer enterochromaffin cells as compared to a control conversion of a plurality of stem cells in a medium comprising (i) serum and/or (ii) an exogenous cell differentiation regulatory factor. A non-endodermal cell can be a mesodermal cell or an ectodermal cell. A mesodermal cell can be capable of differentiating into a mesodermal organ such as a kidney, ureter, heart, blood, gonad, adrenal cortex, muscle, skeleton, dermis, connective tissue, or mesothelium. An ectodermal cell can be capable of differentiating into an ectodermal organ such as a brain, spinal cord, adrenal medulla, epidermis, hair/nail/dermal-gland, sensory organ, peripheral nerve, or lens.

[0221] In some cases, conversion of stem cells to tissue-specific progenitor cells is characterized by producing at most about 50%, at most about 45%, at most about 40%, at most about 35%, at most about 30%, at most about 25%, at most about 20%, at most about 15%, at most about 10%, at most about 5%, or fewer non-endodermal cells. In some cases, conversion of stem cells to tissue-specific progenitor cells is characterized by producing at most about 50%, at most about 45%, at most about 40%, at most about 35%, at most about 30%, at most about 25%, at most about 20%, at most about 15%, at most about 10%, at most about 5%, or fewer enterochromaffin cells. In some cases, the modulation of genes such as SOX2, CDX2, LMX1a, FEV, etc. are used to repress non-endodermal and/or enterochromaffin cell fates.

[0222] Various aspects of the present disclosure provide engineered cells that are programmed to induce a desired expression and/or activity level (or profile thereof) of one or more target genes in a cell.

[0223] In some embodiments, the engineered cell (e.g., the engineered beta cell) of the present disclosure can be generated from an isolated stem cell (e.g., isolated endodermal stem cells or iPSCs). The heterologous genetic circuit and/or its components (e.g. gate units, gate moieties, activating moieties, etc.), as disclosed herein, can be introduced during any stage (or cellular state) between and including (a) the isolated stem cell and (b) the differentiated beta cell state thereof (e.g. a terminally differentiated beta cell state.

[0224] The engineered cell (e.g., the engineered beta cell) of the present disclosure can be used (e.g., administered) to treat a subject in need thereof. The subject can have or can be suspected of having a condition, such as a disease (e.g., cancer). A cell (e.g., a stem cell or a differentiated cell) can be obtained from the subject and such cell can be cultured ex vivo and genetically modified to generate any subject engineered cell (e.g. a beta cell) as disclosed herein. Subsequently, the engineered immune cell can be administered to the subject for adaptive immunotherapy. Thus, the engineered cell can be autologous to the subject in need thereof. Alternatively, the engineered cell can be allogeneic to the subject (e.g., allogeneic stem cell transplantation, allogeneic adoptive immunotherapy, etc.).

[0225] The engineered cells as disclosed herein can be administered to the subject prior to, concurrently with, or subsequent to activation of the heterologous genetic circuit(s) in the engineered stem cells. For example, the engineered cells can be activated subsequent to being administered into the subject, e.g., by administering to the subject an activator of the heterologous genetic circuit(s).

[0226] The subject can be treated (e.g., administered with) a population of engineered cells (e.g., engineered muscle cells) of the present disclosure for at least or up to about 1 dose, at least or up to about 2 doses, at least or up to about 3 doses, at least or up to about 4 doses, at least or up to about 5 doses, at least or up to about 6 doses, at least or up to about 7 doses, at least or up to about 8 doses, at least or up to about 9 doses, or at least or up to about 10 doses. Alternatively, or in addition to, the subject can be treated (e.g., administered with) a population of engineered cells (e.g., engineered T cells) of the present disclosure for at least about 1 week, at least about 2 weeks, at least about 3 weeks, at least about 4 weeks, at least about 5 weeks, at least about 6 weeks, at least about 2 months, at least about 3 months, at least about 4 months, at least about 5 months, at least about 6 months, at least about 7 months, at least about 8 months, at least about 9 months, at least about 10 months, at least about 11 months, at least about 1 year, at least about 2 years, at least about 3 years, at least about 4 years, at least about 5 years, at least about 6 years, at least about 7 years, at least about 8 years, at least about 9 years, at least about 10 years, at least about 15 years, at least about 20 years, at least about 30 years, at least about 40 years, at least about 50 years, at least about 60 years, at least about 70 years, at least about 80 years, at least about 90 years, or at least about 100 years.

[0227] Any one of the methods disclosed herein can be utilized to treat a target cell, a target tissue, a target condition, or a target disease of a subject.

[0228] The target disease of a subject can be a disease which affects the pancreas. A disease which affects the pancreas can include, but is not limited to pancreatitis, cholangitis, cholecystitis, diabetes, gallstones, and pancreatic cancer.

[0229] The target disease of a subject can be a disease which affects insulin production. A disease which affects insulin production can include bus is not limited to diabetes, hypertension, dysilpidemia, and cardiovascular disease.

[0230] The target disease of the subject can be cancer or tumor. Non-limiting examples of cancer can include cells of cancers including Acanthoma, Acinic cell carcinoma, Acoustic neuroma, Acral lentiginous melanoma, Acrospiroma, Acute eosinophilic leukemia, Acute lymphoblastic leukemia, Acute megakaryoblastic leukemia, Acute monocytic leukemia, Acute myeloblastic leukemia with maturation, Acute myeloid dendritic cell leukemia, Acute myeloid leukemia, Acute promyelocytic leukemia, Adamantinoma, Adenocarcinoma, Adenoid cystic carcinoma, Adenoma, Adenomatoid odontogenic tumor, Adrenocortical carcinoma, Adult T-cell leukemia, Aggressive NK-cell leukemia, AIDS-Related Cancers, AIDS-related lymphoma, Alveolar soft part sarcoma, Ameloblastic fibroma, Anal cancer, Anaplastic large cell lymphoma, Anaplastic thyroid cancer, Angioimmunoblastic T-cell lymphoma, Angiomyolipoma, Angiosarcoma, Appendix cancer, Astrocytoma, Atypical teratoid rhabdoid tumor, Basal cell carcinoma, Basal-like carcinoma, B-cell leukemia, B-cell lymphoma, Bellini duct carcinoma, Biliary tract cancer, Bladder cancer, Blastoma, Bone Cancer, Bone tumor, Brain Stem Glioma, Brain Tumor, Breast Cancer, Brenner tumor, Bronchial Tumor, Bronchioloalveolar carcinoma, Brown tumor, Burkitt's lymphoma, Cancer of Unknown Primary Site, Carcinoid Tumor, Carcinoma, Carcinoma in situ, Carcinoma of the penis, Carcinoma of Unknown Primary Site, Carcinosarcoma, Castleman's Disease, Central Nervous System Embryonal Tumor, Cerebellar Astrocytoma, Cerebral Astrocytoma, Cervical Cancer, Cholangiocarcinoma, Chondroma, Chondrosarcoma, Chordoma, Choriocarcinoma, Choroid plexus papilloma, Chronic Lymphocytic Leukemia, Chronic monocytic leukemia, Chronic myelogenous leukemia, Chronic Myeloproliferative Disorder, Chronic neutrophilic leukemia, Clear-cell tumor, Colon Cancer, Colorectal cancer, Craniopharyngioma, Cutaneous T-cell lymphoma, Degos disease, Dermatofibrosarcoma protuberans, Dermoid cyst, Desmoplastic small round cell tumor, Diffuse large B cell lymphoma, Dysembryoplastic neuroepithelial tumor, Embryonal carcinoma, Endodermal sinus tumor, Endometrial cancer, Endometrial Uterine Cancer, Endometrioid tumor, Enteropathy-associated T-cell lymphoma, Ependymoblastoma, Ependymoma, Epithelioid sarcoma, Erythroleukemia, Esophageal cancer, Esthesioneuroblastoma, Ewing Family of Tumor, Ewing Family Sarcoma, Ewing's sarcoma, Extracranial Germ Cell Tumor, Extragonadal Germ Cell Tumor, Extrahepatic Bile Duct Cancer, Extramammary Paget's disease, Fallopian tube cancer, Fetus in fetu, Fibroma, Fibrosarcoma, Follicular lymphoma, Follicular thyroid cancer, Gallbladder Cancer, Gallbladder cancer, Ganglioglioma, Ganglioneuroma, Gastric Cancer, Gastric lymphoma, Gastrointestinal cancer, Gastrointestinal Carcinoid Tumor, Gastrointestinal Stromal Tumor, Gastrointestinal stromal tumor, Germ cell tumor, Germinoma, Gestational choriocarcinoma, Gestational Trophoblastic Tumor, Giant cell tumor of bone, Glioblastoma multiforme, Glioma, Gliomatosis cerebri, Glomus tumor, Glucagonoma, Gonadoblastoma, Granulosa cell tumor, Hairy Cell Leukemia, Hairy cell leukemia, Head and Neck Cancer, Head and neck cancer, Heart cancer, Hemangioblastoma, Hemangiopericytoma, Hemangiosarcoma, Hematological malignancy, Hepatocellular carcinoma, Hepatosplenic T-cell lymphoma, Hereditary breast-ovarian cancer syndrome, Hodgkin Lymphoma, Hodgkin's lymphoma, Hypopharyngeal Cancer, Hypothalamic Glioma, Inflammatory breast cancer, Intraocular Melanoma, Islet cell carcinoma, Islet Cell Tumor, Juvenile myelomonocytic leukemia, Kaposi Sarcoma, Kaposi's sarcoma, Kidney Cancer, Klatskin tumor, Krukenberg tumor, Laryngeal Cancer, Laryngeal cancer, Lentigo maligna melanoma, Leukemia, Leukemia, Lip and Oral Cavity Cancer, Liposarcoma, Lung cancer, Luteoma, Lymphangioma, Lymphangiosarcoma, Lymphoepithelioma, Lymphoid leukemia, Lymphoma, Macroglobulinemia, Malignant Fibrous Histiocytoma, Malignant fibrous histiocytoma, Malignant Fibrous Histiocytoma of Bone, Malignant Glioma, Malignant Mesothelioma, Malignant peripheral nerve sheath tumor, Malignant rhabdoid tumor, Malignant triton tumor, MALT lymphoma, Mantle cell lymphoma, Mast cell leukemia, Mediastinal germ cell tumor, Mediastinal tumor, Medullary thyroid cancer, Medulloblastoma, Medulloblastoma, Medulloepithelioma, Melanoma, Melanoma, Meningioma, Merkel Cell Carcinoma, Mesothelioma, Mesothelioma, Metastatic Squamous Neck Cancer with Occult Primary, Metastatic urothelial carcinoma, Mixed Mullerian tumor, Monocytic leukemia, Mouth Cancer, Mucinous tumor, Multiple Endocrine Neoplasia Syndrome, Multiple Myeloma, Multiple myeloma, Mycosis Fungoides, Mycosis fungoides, Myelodysplastic Disease, Myelodysplastic Syndromes, Myeloid leukemia, Myeloid sarcoma, Myeloproliferative Disease, Myxoma, Nasal Cavity Cancer, Nasopharyngeal Cancer, Nasopharyngeal carcinoma, Neoplasm, Neurinoma, Neuroblastoma, Neuroblastoma, Neurofibroma, Neuroma, Nodular melanoma, Non-Hodgkin Lymphoma, Non-Hodgkin lymphoma, Nonmelanoma Skin Cancer, Non-Small Cell Lung Cancer, Ocular oncology, Oligoastrocytoma, Oligodendroglioma, Oncocytoma, Optic nerve sheath meningioma, Oral Cancer, Oral cancer, Oropharyngeal Cancer, Osteosarcoma, Osteosarcoma, Ovarian Cancer, Ovarian cancer, Ovarian Epithelial Cancer, Ovarian Germ Cell Tumor, Ovarian Low Malignant Potential Tumor, Paget's disease of the breast, Pancoast tumor, Pancreatic Cancer, Pancreatic cancer, Papillary thyroid cancer, Papillomatosis, Paraganglioma, Paranasal Sinus Cancer, Parathyroid Cancer, Penile Cancer, Perivascular epithelioid cell tumor, Pharyngeal Cancer, Pheochromocytoma, Pineal Parenchymal Tumor of Intermediate Differentiation, Pineoblastoma, Pituicytoma, Pituitary adenoma, Pituitary tumor, Plasma Cell Neoplasm, Pleuropulmonary blastoma, Polyembryoma, Precursor T-lymphoblastic lymphoma, Primary central nervous system lymphoma, Primary effusion lymphoma, Primary Hepatocellular Cancer, Primary Liver Cancer, Primary peritoneal cancer, Primitive neuroectodermal tumor, Prostate cancer, Pseudomyxoma peritonei, Rectal Cancer, Renal cell carcinoma, Respiratory Tract Carcinoma Involving the NUT Gene on Chromosome 15, Retinoblastoma, Rhabdomyoma, Rhabdomyosarcoma, Richter's transformation, Sacrococcygeal teratoma, Salivary Gland Cancer, Sarcoma, Schwannomatosis, Sebaceous gland carcinoma, Secondary neoplasm, Seminoma, Serous tumor, Sertoli-Leydig cell tumor, Sex cord-stromal tumor, Sezary Syndrome, Signet ring cell carcinoma, Skin Cancer, Small blue round cell tumor, Small cell carcinoma, Small Cell Lung Cancer, Small cell lymphoma, Small intestine cancer, Soft tissue sarcoma, Somatostatinoma, Soot wart, Spinal Cord Tumor, Spinal tumor, Splenic marginal zone lymphoma, Squamous cell carcinoma, Stomach cancer, Superficial spreading melanoma, Supratentorial Primitive Neuroectodermal Tumor, Surface epithelial-stromal tumor, Synovial sarcoma, T-cell acute lymphoblastic leukemia, T-cell large granular lymphocyte leukemia, T-cell leukemia, T-cell lymphoma, T-cell prolymphocytic leukemia, Teratoma, Terminal lymphatic cancer, Testicular cancer, Thecoma, Throat Cancer, Thymic Carcinoma, Thymoma, Thyroid cancer, Transitional Cell Cancer of Renal Pelvis and Ureter, Transitional cell carcinoma, Urachal cancer, Urethral cancer, Urogenital neoplasm, Uterine sarcoma, Uveal melanoma, Vaginal Cancer, Verner Morrison syndrome, Verrucous carcinoma, Visual Pathway Glioma, Vulvar Cancer, Waldenstrom's macroglobulinemia, Warthin's tumor, Wilms' tumor, and combinations thereof. In some embodiments, the targeted cancer cell represents a subpopulation within a cancer cell population, such as a cancer stem cell. In some embodiments, the cancer is of a hematopoietic lineage, such as a lymphoma. The antigen can be a tumor associated antigen.

[0231] Non-limiting examples of the target tissue can include cells, for example beta cells, which can be obtained from a subject. Non-limiting examples of subjects include humans, dogs, cats, mice, rats, and transgenic species thereof. Examples of samples from a subject from which cells can be derived include, without limitation, skin, heart, lung, kidney, bone marrow, breast, pancreas, liver, muscle, smooth muscle, bladder, gall bladder, colon, intestine, brain, prostate, esophagus, thyroid, serum, saliva, urine, gastric and digestive fluid, tears, stool, semen, vaginal fluid, interstitial fluids derived from tumorous tissue, ocular fluids, sweat, mucus, earwax, oil, glandular secretions, spinal fluid, hair, fingernails, plasma, nasal swab or nasopharyngeal wash, spinal fluid, cerebral spinal fluid, tissue, throat swab, biopsy, placental fluid, amniotic fluid, cord blood, emphatic fluids, cavity fluids, sputum, pus, microbiota, meconium, breast milk, and/or other excretions or body tissues.

[0232] The present disclosure also provides a composition comprising the engineered genetic circuit(s) as disclosed herein. The composition can further comprise the actuator of the heterologous genetic circuit(s). The present disclosure also provides a kit comprising the composition. The kit can further comprise the activator(s) of the heterologous genetic circuit(s). The activator(s) can be in the same composition as the engineered cells. Alternatively or in addition to, the activator(s) can be in a different and separate composition from the engineered cells.

[0233] In some cases, the engineered progenitor cells disclosed herein can exhibit (i) comparable or enhanced regenerative capacity; (ii) comparable or enhanced in vitro expression; (iii) comparable or enhanced genetic editing capabilities; (iv) comparable or enhanced immunotolerance; (v) comparable or shorter manufacturing timelines; (vi) comparable or fewer growth factor or culturing requirements; and/or (vii) comparable or enhanced safety, as compared to a control progenitor cell.

[0234] The control progenitor cell can be generated by any method comprising expansion of a progenitor cell (e.g., pancreatic lineage cell) isolated from a tissue, directed iPSC differentiation (e.g., using exogenous growth factors), and/or transgenic iPSC differentiation (e.g., viral transduction of heterologous genes).

[0235] In some cases, the tissue-specific progenitor cells can be stored in a receptacle (e.g., a sterilized vial). In some cases, the tissue-specific progenitor cells are stored at a temperature of at most about 10° C., at most about 5° C., at most about 4° C., at most about 0° C., at most about −5° C., at most about −10° C., at most about −20° C., at most about −30° C., at most about −40° C., at most about −50° C., at most about −60° C., at most about −70° C., at most about −80° C., at most about −90° C., at most about −100° C., at most about −110° C., at most about −120° C., at most about −130° C., at most about −140° C., at most about −150° C., at most about −160° C., at most about −170° C., at most about −180° C., at most about −190° C., at most about −200° C., or colder.

### Pharmaceutical Compositions

[0236] In some cases, methods disclosed herein comprise administering at least one of the tissue-specific progenitor cells to a subject in need thereof. A subject can be an animal. A subject can be a mammal (e.g., a primate, a horse, a cat, a dog, a cow, a pig, a sheep, a goat, a mouse, a rabbit, a rat, a guinea pig). A subject can be a human subject.

[0237] A pharmaceutical composition of the disclosure can be a combination of any pharmaceutical compounds described herein with other chemical components, such as carriers, stabilizers, diluents, dispersing agents, suspending agents, thickening agents, and/or excipients. The pharmaceutical composition facilitates administration of the compound to an organism. Pharmaceutical compositions can be administered in therapeutically-effective amounts as pharmaceutical compositions by various forms and routes including, for example, intravenous, subcutaneous, intramuscular, inhalation, oral, parenteral, ophthalmic, otic, subcutaneous, transdermal, nasal, intravitreal, intratracheal, intrapulmonary, transmucosal, vaginal, and topical administration.

[0238] Formulations can be modified depending upon the route of administration chosen. Pharmaceutical compositions comprising a compound described herein can be manufactured, for example, by mixing, dissolving, emulsifying, encapsulating, entrapping, or compression processes.

### EXAMPLES

### Example 1: Differentiation of Pancreatic Lineage Cells

[0239] Tissue-specific cells (e.g., pancreatic lineage cells) can be generated from less-differentiated cells (e.g., stem cells, such as iPSCs) by the systems and methods of the present disclosure.

### A. Generation of Pancreatic Lineage Cells.

[0240] In this example, endodermal stem cells were formed into pancreatic lineage cells using heterologous genetic circuits. Differentiation of a stem cell (e.g., an endodermal stem cell) to a pancreatic lineage cell can be a complex process requiring turning on a plurality of endogenous genes at different time points, while turning off a plurality of endogenous genes at different time points. See FIG. 2 for examples of different endogenous genes that are induced for expression at different stages of a differentiation of a stem cell to a pancreatic lineage cell, then to a beta cell. Thus, one or more heterologous genetic circuits as disclosed herein can be utilized to automatically promote regulation of such cascade of different endogenous gene expressions. In some cases, each heterologous genetic circuit can be configured to regulate expression levels of a plurality of genes at a plurality of different time points upon a single activation of such heterologous genetic circuit.

[0241] The endodermal stem cells were transiently transfected with plasmid DNAs encoding one of the heterologous genetic circuits as described in FIG. 3, e.g., targeting a combination of TBXT, FOXA2, SOX17, PDX1, GATA4, p53shRNA, HNF6, PTF1A, NGN3, NEUROG3, NKX6.1, SOX9, NKX2.2, MAFA, ONECUT1, NEUROD3, and ISL1. All genes targeted were activated. Flow cytometry was used to analyze for CD45−/EpCam+ cells (endodermal progenitor markers), ECAD/CD142 double positive cells (pancreatic progenitor markers), and CD49a positive cells (immature beta cell markers), each of which indicated the formation of pancreatic lineage cells (FIG. 6). Lesser performing HCGs, such as Cellgorithms 1, 2, 3, 4, 5, 6, 7, 13, 14, 23, and 24 were all found to share the same gene in step 1: TBXT. Top performing HCGs, such as Cellgorithms 9 and 16, were found to produce cultures with islet-like morphology in eight days (FIG. 7). Top performing HCGs, such as Cellgorithm 11, were also found to convert at least 15% or more of cells into insulin positive cells in eight days (FIGS. 8A-8B).

### B. Characterization of Pancreatic Lineage Cells Generated by a Heterologous Genetic Circuit.

[0242] Transient plasmid delivery of the heterologous genetic circuits induced pancreatic lineage cell markers to appear after four days. Analysis revealed that several of the heterologous genetic circuits, such as heterologous genetic circuits 9, 11, and 16 (i.e., Cellgorithms 9, 11, and 16), provided in FIG. 3 yielded at least about 15% endodermal stem cell to pancreatic lineage cell conversion in four days. This conversion occurred faster than the conversion of pancreatic lineage cells by direct differentiation (FIG. 9).

[0243] FIGS. 4A-4D and FIG. 5 show volcano plots depicting the results of cells grown under different conditions. The plots in FIGS. 4A-4D and FIG. 5 show that various heterologous genetic circuits (e.g., Cellgorithm 15, Cellgorithm 16, Cellgorithm 18, etc.) can generate pancreatic lineage cells.

### Example 2: Beta Cell Functional Assays

[0244] In this prophetic example, iPSCs and endodermal stem cells are contacted with top-performing HGCs from Example 1 and allowed to grow in media until beta cells form. Control beta cell populations are collected and purified from mouse samples. Beta cells from both the HGC and control populations are tested for insulin production.

### Example 3: Implantation and Engraftment of Pancreatic Lineage Cells

[0245] Tissue-specific cells (e.g., pancreatic lineage cells) as prepared by the systems and methods of the present disclosure can be administered to a subject in need thereof (e.g., injected into pancreatic tissue), to treat a pancreatic-related disorder (e.g., diabetes) of a subject.

### A. Generation of Pancreatic Lineage Cells.

[0246] Stem cells (e.g., endodermal stem cells) can be transduced or transfected (e.g., transiently transfected) with one or more heterologous genes (e.g., plasmid DNAs) encoding a at least one heterologous genetic circuit, such as, for example, one of the respective heterologous genetic circuit as shown in FIG. 3, in accordance with the methods described in Example 1, in order to generate pancreatic lineage cells.

### B. In Vivo Administration of Pancreatic Lineage Cells.

[0247] Upon generation of pancreatic lineage cells by systems and methods of the present disclosure, the pancreatic lineage cells can be purified. Cells can be concentrated and resuspended in a buffer (e.g., PBS), and then be administered to mice via injection directly into the pancreas or other site of interest. After 8 to 10 weeks, the mice can be sacrificed, and the tissue surrounding the area of injection can be sectioned. Sections can be immunostained for islet cells or insulin production to confirm the engraftment of the ex vivo-generated pancreatic lineage cells.

[0248] An additional protocol for pancreatic lineage cell transplantation is provided herein. Upon generation as described herein, the pancreatic lineage cells can be suspended in cell media. These cells can be transplanted into a target site in a pancreas with or without further expansion. For expansion, the pancreatic lineage cells can be plated into tissue culture wells containing hydrogels (flat or patterned) or thin gel coated plastic (flat or patterned) as sparse cultures (e.g. 1000-2000 cells/well of a 24 well size plate) and cultured while replacing media every 3 days. On the day of transplantation, NOD/SCID mice can be anesthetized by intraperitoneal injection of Ketamine (2.4 mg/mouse) and Xylazine (240 g/mouse) and hindlimb irradiated as previously described (A. Sacco et al. (2008) Nature 456, 502). The generated pancreatic lineage cells can be counted and resuspended, and subsequently injected into recipient mice.

[0249] Engraftment (e.g., differentiation and integration into the local pancreatic tissue) of the transplanted pancreatic lineage cells can be visualized by various methods. For example, the pancreatic lineage cells can be engineered to express a heterologous marker (e.g., fluorescent proteins, such as green fluorescent protein) that is not present in the transplanted animal. Alternatively or in addition to, the pancreatic lineage cells can be allogeneic to the animal, such that any insulin that is produced from the pancreatic lineage cells upon the transplantation can be identified (e.g., immunostaining) by an antigen that is not found in the transplanted animal.

### Example 4: Creating Beta Cells In Vitro

[0250] For an improved cell manufacturing process, cells of interest can be engineered to exhibit increased expression of genes that can alter their phenotype into the pancreatic beta cell lineage. In some embodiments, improved cell manufacturing can be evidenced by shorter time to differentiate stem cells (e.g., pluripotent stem cells) to target cells (e.g., pancreatic precursor or beta cells), increased number of target cells as compared to other protocols, enhanced level of insulin and/or c-peptide that is produced and/or secreted, lower cost to produce a similar number of target cells, and more. FIG. 9 shows certain advantages of the system and methods disclosed herein compared to directed differentiation. Upon nucleofection of a Cellgorithm into the cells of interest, these genes can sequentially expressed within the cell of interest.

[0251] The cells of interest can be induced pluripotent stem cells. Cells post engineering can exhibit increased presence of markers of the pancreatic beta cell lineage by measurements of RNA transcription, can exhibit DNA accessibility indicative of cells in the pancreatic beta lineage, and/or increased function in glucose-responsiveness assays measuring 1) insulin production 2) insulin release 3) c-peptide production and/or 4) c-peptide release.

### Example 5: Generation of Cells in the Pancreatic Beta Cell Lineage

[0252] For example, a library of Cellgorithms including but not limited to Cellgorithms labeled in Table 1 which are built from sequences with core function units described in SEQ ID NOs: 1-2024 can be introduced to cells of interest. Table 4 (SEQ ID Nos: 1-2024) shows 2024 unique beta proGuide constructs (e.g., there are 23 unique stem combinations. There are 22 unique “4-pools” of beta spacers. There are 4 pools because for each gene, all 4 constructs targeting that gene are used together. So that implies there are 22*23=506 different combinations. If each individual construct is counted, then it will be multiplied by 4). Cells can be cultured upon Geltrex with M3 (alk alt) media (Table 2) or activin A media (Table 3). Cells can be measured at days 1-14 using live cell imaging, phenotyping assays for insulin production and release as well as c-peptide production and release. Measures of pancreatic cell identity include RNAseq markers such as the genes: CHGA, INS, GCG, PDX1, NKX6.1, SST, HHEX, ISL1, ARX, IRX2, TPH1, DDC, SLC18A1, LMX1A, ADRA2A, FEV, TAC1, NEUROG3, FOXJ1, TOP2A, DISP2, TUBAIB, MYL7, AFP, TTR, LGALS3, HSPA1A, HSPA6, HSPA1B, FN1, COLSA2, COL21A1, SOX9, SOX17, ASCL1, HOXB2, PYY, DNAJB1, ALDHIA1, MAFA, MAFB, NEUROD1, DLK1, LDHB, ITGB1, SUSD2, F3, GP2, CLU, NTS, NKX2.2, ACSL1, PPY, POU5F1, NANOG, OTX2, SOX2, CDX2, TBXT, GATA4, GATA6, EOMES, CER1, GSC, HLXB9, MNX1, HNF1B, HNF4A, HNF6, ONECUT1, TBX3, PTF1A, NR5A2, PROXI, HES1, NGN3, PAX6, SIX2, RFX6, GLIS3, BRN4, LRX2, PAX4, CDH1, EPCAM, ITGA1, CFTR, KRT19, SPP1, NKX6-1, NKX2-2, TFAP2A, TFAP2B, NES, VIM, ACVR1C, DHRS2, HOPX, NKX2.1, G6PC2, NPTX2, CXCR4, FOXA2, FOXA1, RNA28SN4, RNA28SN2, RNA28SN1, NEUROG1, HNF1A, INSM1, RFX3, ATF3, ATF4, ATF5, BMAL1, CREB, CRTC2, EGR1, ESRRG, FOS, FOXO1, FOX03, FOX04, MYC, P53, NFATC1, NFATC2, NR4A1, PPARA, PPARG, PPARD, NR1D1, SIX3, SMAD2, SMAD3, SREBP1, SRF, THRA, THRB, BEX1, CD82, ID3.

TABLE 1
Example of Multi-Step Cascade Cellgorithms. Condition 1 is a negative empty control.

| Condition | step 1 | | | | | | |
|---|---|---|---|---|---|---|---|
| # | (psp) | step 2 | step 3 | step 4 | step 5 | step 6 | step 7 |
| 1 | | | | | | | |
| 2 | FOXA2, | Empty | PTF1a | Empty | PDX1 | Empty | NEUROG3 |
| | SOX17 | | | | | | |
| 3 | FOXA2 | Empty | PDX1 | Empty | NGN3 | Empty | MAFA |
| | SOX17 | | | | | | |
| | GATA4 | | | | | | |
| 4 | FOXA2 | Empty | PDX1 | Empty | SOX9 | Empty | MAFA |
| | SOX17 | | PTF1A | | ONECUT1 | | NKX2.2 |
| | GATA4 | | NEUROG3 | | | | NEUROD1 |
| | | | NKX6.1 | | | | ISL1 |
| 5 | GATA6 | Empty | PDX1 | Empty | SOX9 | Empty | MAFA |
| | | | PTF1A | | NGN3 | | NKX6.1 |
| 6 | FOXA2 | Empty | PDX1 | Empty | NEUROD1 | Empty | MAFA |
| | SOX17 | | NGN3 | | NKX6.1 | | |
| | GATA4 | | NKX2.2 | | | | |
| 7 | FOXA2 | Empty | NEUROD1 | Empty | Empty | MAFA | Empty |
| | SOX17 | | NKX2.2 | | | | |
| | PDX1 | | NGN3 | | | | |
| | NKX6.1 | | | | | | |
| | GATA4 | | | | | | |
| 8 | FOXA2 | Empty | PDX1 | Empty | Empty | Empty | Empty |
| | SOX17 | | NKX6.1 | | | | |
| 9 | FOXA2 | Empty | Empty | Empty | Empty | PDX1 | Empty |
| | SOX17 | | | | | PTF1A | |
| | GATA4 | | | | | NEUROG3 | |
| | | | | | | NKX6.1 | |
| 10 | FOXA2 | Empty | Empty | Empty | Empty | PDX1 | Empty |
| | SOX17 | | | | | NKX6.1 | |
| 11 | FOXA2 | Empty | Empty | Empty | Empty | Empty | Empty |
| | SOX17 | | | | | | |
| | GATA4 | | | | | | |
| | PDX1 | | | | | | |
| | NKX6.1 | | | | | | |
| 12 | FOXA2 | Empty | Empty | Empty | Empty | Empty | Empty |
| | SOX17 | | | | | | |
| | GATA4 | | | | | | |
| | PDX1 | | | | | | |
| | NKX6.1 | | | | | | |
| | NEUROD1 | | | | | | |
| | NEUROG3 | | | | | | |
| | MAFA | | | | | | |

TABLE 2
Example of M3 Cell Culture Media for generation of beta cells

| | | | | | Final | | | | Dilution | |
|---|---|---|---|---|---|---|---|---|---|---|
| MEDIA_Name | Component | Source | Cat # | Volume | Conc | unit | Stock | unit | Factor | Solvent |
| #1 M3 (alkalt) | DMEM - | Life | 11965118 | 100 | na | | | | | |
| | HG | Tech | | mL | | | | | | |
| #1 M3 (alkalt) | Glutamax | | | 1 | | | | | | |
| | | | | mL | | | | | | |
| #1 M3 (alkalt) | NEAA | Life | | 1 | | | | | | |
| | | Tech | | mL | | | | | | |
| #1 M3 (alkalt) | B27 | Life | 17504044 | 1 | 1 | % | 100 | % | 100 | |
| | | Tech | | mL | | | | | | |
| #1 M3 (alkalt) | Pen/Strep | Life | 15140122 | 1 | 100 | U/ | 10000 | U/ | 100 | |
| | | Tech | | mL | | mL | | mL | | |
| #1 M3 (alkalt) | A83-01 | | | 60 | 6 | uM | 10 | mM | 1666.6666 | |
| | | | | uL | | | | | | |
| #1 M3 (alkalt) | T3 | R&D | 6666 | 20 | 1 | uM | 5 | mM | 5000 | 0.1N |
| | | Systems | | uL | | | | | | NaOH |
| #1 M3 (alkalt) | Beta- | R&D | 261-CE | 20 | 20 | ng/ | 100 | ug/ | 5000 | 0.1% |
| | Cellulin | Systems | | uL | | uL | | mL | | BSA |
| | | | | | | | | | | in PBS |

TABLE 3
Example of Activin A Cell Culture Media for generation of beta cells

| | | | | | | Final | | | | Dilution | |
|---|---|---|---|---|---|---|---|---|---|---|---|
| MEDIA_Name | Component | Source | Cat # | Volume | unit | Conc | unit | Stock | unit | Factor | Solvent |
| #4 | DMEM - | Life | 11965118 | 100 | mL | na | | | | | |
| activin a | HG | Tech | | | | | | | | | |
| #4 | Glutamax | | | 1 | | | | | | | |
| activin a | | | | | | | | | | | |
| #4 | NEAA | Life | | 1 | mL | | | | | | |
| activin a | | Tech | | | | | | | | | |
| #4 | Pen/Strep | Life | 15140122 | 1 | mL | 100 | U/ | 10000 | U/ | 100 | |
| activin a | | Tech | | | | | mL | | mL | | |
| #4 | Activin A | | | 100 | ul | 100 | ng/ | 100 | ug/ | 1000 | |
| activin a | | | | | | | ml | | ml | | |
| #4 | Chiron | | | 30 | ul | 3 | uM | 100 | mM | 333 | |
| activin a | | | | | | | | | | | |
| #4 | | | | | | | | | | | |
| activin a | | | | | | | | | | | |

### Example 6: In Vivo Validation of Cellgorithm-Derived Cells

### BACKGROUND

[0253] Pancreatic beta cells and other cell of the islet generated using Cellgorithm technology can be used as a regenerative therapy for individuals with defective pancreatic function, specifically relating to insulin production. The delivery of these cells into such individuals can provide an alleviation to the need for exogenous insulin. Once produced by Cellgorithm-driven instructions, the islets can be used in the same manner as islets produced by other methods, such as isolation from cadaveric donors, or differentiation of pluripotent stem cells using protocols for changing growth factors and other small molecules over a period of time (e.g., directed differentiation) Regardless of their origin, islets can be evaluated and used in vivo by injecting them under the kidney capsule, into the portal vein, intramuscularly, or within an encapsulated device that resides subcutaneously. Islets can be phenotypically characterized based on gene expression and cell surface marker characteristics and can be functionally characterized for their ability to regulate blood sugars and appetite. In vitro and in vivo characterizations of glucose responsiveness and subsequent insulin secretion can provide significant insight to the quality of the islets.

[0254] To evaluate function of the produced islets, induced diabetes animal models are employed. These mice have streptazocotin (STZ) injected into their pancreas to induce destruction of the organ, rendering the mouse diabetic Following this, islets are injected into the tissue of interest and the mice are fed. Glucose levels and insulin levels in the blood/sera are measured to characterize the islet performance.

### Method

[0255] Immunodeficient mice (e.g., SCID-Beige), aged 8-10 weeks, can be procured from Taconic or The Jackson Laboratory, and NOD.Cg-Rag1tm 1 Mom IL2rgtm 1 Wjl Ins2Akita (NRG-Akita), aged 8-12 weeks, can also be procured for the validation studies. Human islets (e.g., 500-1000 IEQ per animal for SCID-Beige or 4,000 IEQ per animal for NRG-Akita mice) or iPS-derived cell clusters (e.g., Se6 cells per animal) can be loaded into catheter for cell delivery below the kidney capsule of the mice. Mice can then be analyzed at selected times by performing a glucose challenge, measuring blood glucose, and collecting serum to measure human insulin. After fasting the mice overnight (e.g., 16 hours), mice can be injected (e.g., intraperitoneally (IP)) with D-(+)-glucose (e.g., 2 g glucose/1 kg body weight). Blood glucose can be measured and serum collected at specified time points (e.g. 0 min and 30 min) post glucose injection. Blood glucose levels observed should notably decrease in the mice containing the transplanted islets. As a readout for transplanted islet cell function, serum human insulin levels can be quantified (e.g., using a Human Ultrasensitive Insulin ELISA). The human insulin levels in the mouse sera should markedly increase within a short time period (e.g., 30 min to 60 min) post feeding. Kidneys containing the grafts can then be dissected from the mice, fixed overnight (e.g., in 4% PFA), embedded in paraffin, and sectioned for histological analysis to ascertain the composition of the transplanted islets (e.g., ratios of alpha to beta to gamma cells, etc). The presence of beta cells should be observed and identified (e.g., by insulin protein expression post immunofluorescent staining).

TABLE 4
Concatenated sequences of proGuides

| Gene Target | | |
|---|---|---|
| for Spacer | SEQ | |
| (if | ID | |
| applicable) | NO: | full sequence |
| EGF | 1 | -GAACTGCTAAATAT-GTTTTAGAGCTA- |
| | | CCGTCGTTGTACCGTCTACTTGAC- |
| | | TTTTTTTTcagccaactccaaTTTTTTTT- |
| | | GTCAAGTAGACGGTACAACGACGG |
| EGF | 2 | g-CAATTCCTCCACAC-GTTTTAGAGCTA- |
| | | CCGTCGTTGTACCGTCTACTTGAC- |
| | | TTTTTTTTcagccaactccaaTTTTTTTT- |
| | | GTCAAGTAGACGGTACAACGACGG |
| EGF | 3 | g-TCAAGTGTCACTAA-GTTTTAGAGCTA- |
| | | CCGTCGTTGTACCGTCTACTTGAC- |
| | | TTTTTTTTcagccaactccaaTTTTTTTT- |
| | | GTCAAGTAGACGGTACAACGACGG |
| EGF | 4 | g-ACCATAAATATCCT-GTTTTAGAGCTA- |
| | | CCGTCGTTGTACCGTCTACTTGAC- |
| | | TTTTTTTTcagccaactccaaTTTTTTTT- |
| | | GTCAAGTAGACGGTACAACGACGG |
| EGF | 5 | -GAACTGCTAAATAT-GTTTTAGAGCTA- |
| | | CCTACACTCGACATCGGTAGCTA- |
| | | TTTTTTTTcagccaactccaaTTTTTTTT- |
| | | TAGCTACCGATGTCGAGTGTAGG |
| EGF | 6 | g-CAATTCCTCCACAC-GTTTTAGAGCTA- |
| | | CCTACACTCGACATCGGTAGCTA- |
| | | TTTTTTTTcagccaactccaaTTTTTTTT- |
| | | TAGCTACCGATGTCGAGTGTAGG |
| EGF | 7 | g-TCAAGTGTCACTAA-GTTTTAGAGCTA- |
| | | CCTACACTCGACATCGGTAGCTA- |
| | | TTTTTTTTcagccaactccaaTTTTTTTT- |
| | | TAGCTACCGATGTCGAGTGTAGG |
| EGF | 8 | g-ACCATAAATATCCT-GTTTTAGAGCTA- |
| | | CCTACACTCGACATCGGTAGCTA- |
| | | TTTTTTTTcagccaactccaaTTTTTTTT- |
| | | TAGCTACCGATGTCGAGTGTAGG |
| EGF | 9 | -GAACTGCTAAATAT-GTTTTAGAGCTA- |
| | | CCCTGGCGGAACGTTCGAGTAAT- |
| | | TTTTTTTTcagccaactccaaTTTTTTTT- |
| | | ATTACTCGAACGTTCCGCCAGGG |
| EGF | 10 | g-CAATTCCTCCACAC-GTTTTAGAGCTA- |
| | | CCCTGGCGGAACGTTCGAGTAAT- |
| | | TTTTTTTTcagccaactccaaTTTTTTTT- |
| | | ATTACTCGAACGTTCCGCCAGGG |
| EGF | 11 | g-TCAAGTGTCACTAA-GTTTTAGAGCTA- |
| | | CCCTGGCGGAACGTTCGAGTAAT- |
| | | TTTTTTTTcagccaactccaaTTTTTTTT- |
| | | ATTACTCGAACGTTCCGCCAGGG |
| EGF | 12 | g-ACCATAAATATCCT-GTTTTAGAGCTA- |
| | | CCCTGGCGGAACGTTCGAGTAAT- |
| | | TTTTTTTTcagccaactccaaTTTTTTTT- |
| | | ATTACTCGAACGTTCCGCCAGGG |
| EGF | 13 | -GAACTGCTAAATAT-GTTTTAGAGCTA- |
| | | CCTACACGATAGTGGTCGTGCGC- |
| | | TTTTTTTTcagccaactccaaTTTTTTTT- |
| | | GCGCACGACCACTATCGTGTAGG |
| EGF | 14 | g-CAATTCCTCCACAC-GTTTTAGAGCTA- |
| | | CCTACACGATAGTGGTCGTGCGC- |
| | | TTTTTTTTcagccaactccaaTTTTTTTT- |
| | | GCGCACGACCACTATCGTGTAGG |
| EGF | 15 | g-TCAAGTGTCACTAA-GTTTTAGAGCTA- |
| | | CCTACACGATAGTGGTCGTGCGC- |
| | | TTTTTTTTcagccaactccaaTTTTTTTT- |
| | | GCGCACGACCACTATCGTGTAGG |
| EGF | 16 | g-ACCATAAATATCCT-GTTTTAGAGCTA- |
| | | CCTACACGATAGTGGTCGTGCGC- |
| | | TTTTTTTTcagccaactccaaTTTTTTTT- |
| | | GCGCACGACCACTATCGTGTAGG |
| EGF | 17 | -GAACTGCTAAATAT-GTTTTAGAGCTA- |
| | | CCTTCCCGACTTCCGTAGGAGCGC- |
| | | TTTTTTTTcagccaactccaaTTTTTTTT- |
| | | GCGCTCCTACGGAAGTCGGGAAGG |
| EGF | 18 | g-CAATTCCTCCACAC-GTTTTAGAGCTA- |
| | | CCTTCCCGACTTCCGTAGGAGCGC- |
| | | TTTTTTTTcagccaactccaaTTTTTTTT- |
| | | GCGCTCCTACGGAAGTCGGGAAGG |
| EGF | 19 | g-TCAAGTGTCACTAA-GTTTTAGAGCTA- |
| | | CCTTCCCGACTTCCGTAGGAGCGC- |
| | | TTTTTTTTcagccaactccaaTTTTTTTT- |
| | | GCGCTCCTACGGAAGTCGGGAAGG |
| EGF | 20 | g-ACCATAAATATCCT-GTTTTAGAGCTA- |
| | | CCTTCCCGACTTCCGTAGGAGCGC- |
| | | TTTTTTTTcagccaactccaaTTTTTTTT- |
| | | GCGCTCCTACGGAAGTCGGGAAGG |
| EGF | 21 | -GAACTGCTAAATAT-GTTTTAGAGCTA- |
| | | CCTGAAGGTAAAGATCGGGTCCTC- |
| | | TTTTTTTTcagccaactccaaTTTTTTTT- |
| | | GAGGACCCGATCTTTACCTTCAGG |
| EGF | 22 | g-CAATTCCTCCACAC-GTTTTAGAGCTA- |
| | | CCTGAAGGTAAAGATCGGGTCCTC- |
| | | TTTTTTTTcagccaactccaaTTTTTTTT- |
| | | GAGGACCCGATCTTTACCTTCAGG |
| EGF | 23 | g-TCAAGTGTCACTAA-GTTTTAGAGCTA- |
| | | CCTGAAGGTAAAGATCGGGTCCTC- |
| | | TTTTTTTTcagccaactccaaTTTTTTTT- |
| | | GAGGACCCGATCTTTACCTTCAGG |
| EGF | 24 | g-ACCATAAATATCCT-GTTTTAGAGCTA- |
| | | CCTGAAGGTAAAGATCGGGTCCTC- |
| | | TTTTTTTTcagccaactccaaTTTTTTTT- |
| | | GAGGACCCGATCTTTACCTTCAGG |
| EGF | 25 | -GAACTGCTAAATAT-GTTTTAGAGCTA- |
| | | CCTGGTTATAGCGGACGCACTGT- |
| | | TTTTTTTTcagccaactccaaTTTTTTTT- |
| | | ACAGTGCGTCCGCTATAACCAGG |
| EGF | 26 | g-CAATTCCTCCACAC-GTTTTAGAGCTA- |
| | | CCTGGTTATAGCGGACGCACTGT- |
| | | TTTTTTTTcagccaactccaaTTTTTTTT- |
| | | ACAGTGCGTCCGCTATAACCAGG |
| EGF | 27 | g-TCAAGTGTCACTAA-GTTTTAGAGCTA- |
| | | CCTGGTTATAGCGGACGCACTGT- |
| | | TTTTTTTTcagccaactccaaTTTTTTTT- |
| | | ACAGTGCGTCCGCTATAACCAGG |
| EGF | 28 | g-ACCATAAATATCCT-GTTTTAGAGCTA- |
| | | CCTGGTTATAGCGGACGCACTGT- |
| | | TTTTTTTTcagccaactccaaTTTTTTTT- |
| | | ACAGTGCGTCCGCTATAACCAGG |
| EGF | 29 | -GAACTGCTAAATAT-GTTTTAGAGCTA- |
| | | CCGCATCGTATTATCTGCGAAGC- |
| | | TTTTTTTTcagccaactccaaTTTTTTTT- |
| | | GCTTCGCAGATAATACGATGCGG |
| EGF | 30 | g-CAATTCCTCCACAC-GTTTTAGAGCTA- |
| | | CCGCATCGTATTATCTGCGAAGC- |
| | | TTTTTTTTcagccaactccaaTTTTTTTT- |
| | | GCTTCGCAGATAATACGATGCGG |
| EGF | 31 | g-TCAAGTGTCACTAA-GTTTTAGAGCTA- |
| | | CCGCATCGTATTATCTGCGAAGC- |
| | | TTTTTTTTcagccaactccaaTTTTTTTT- |
| | | GCTTCGCAGATAATACGATGCGG |
| EGF | 32 | g-ACCATAAATATCCT-GTTTTAGAGCTA- |
| | | CCGCATCGTATTATCTGCGAAGC- |
| | | TTTTTTTTcagccaactccaaTTTTTTTT- |
| | | GCTTCGCAGATAATACGATGCGG |
| EGF | 33 | -GAACTGCTAAATAT-GTTTTAGAGCTA- |
| | | CCGCTAGGACGTTCAACGGAGTC- |
| | | TTTTTTTTcagccaactccaaTTTTTTTT- |
| | | GACTCCGTTGAACGTCCTAGCGG |
| EGF | 34 | g-CAATTCCTCCACAC-GTTTTAGAGCTA- |
| | | CCGCTAGGACGTTCAACGGAGTC- |
| | | TTTTTTTTcagccaactccaaTTTTTTTT- |
| | | GACTCCGTTGAACGTCCTAGCGG |
| EGF | 35 | g-TCAAGTGTCACTAA-GTTTTAGAGCTA- |
| | | CCGCTAGGACGTTCAACGGAGTC- |
| | | TTTTTTTTcagccaactccaaTTTTTTTT- |
| | | GACTCCGTTGAACGTCCTAGCGG |
| EGF | 36 | g-ACCATAAATATCCT-GTTTTAGAGCTA- |
| | | CCGCTAGGACGTTCAACGGAGTC- |
| | | TTTTTTTTcagccaactccaaTTTTTTTT- |
| | | GACTCCGTTGAACGTCCTAGCGG |
| EGF | 37 | -GAACTGCTAAATAT-GTTTTAGAGCTA- |
| | | CCATAGCGGTACTATCGGCATCT- |
| | | TTTTTTTTcagccaactccaaTTTTTTTT- |
| | | AGATGCCGATAGTACCGCTATGG |
| EGF | 38 | g-CAATTCCTCCACAC-GTTTTAGAGCTA- |
| | | CCATAGCGGTACTATCGGCATCT- |
| | | TTTTTTTTcagccaactccaaTTTTTTTT- |
| | | AGATGCCGATAGTACCGCTATGG |
| EGF | 39 | g-TCAAGTGTCACTAA-GTTTTAGAGCTA- |
| | | CCATAGCGGTACTATCGGCATCT- |
| | | TTTTTTTTcagccaactccaaTTTTTTTT- |
| | | AGATGCCGATAGTACCGCTATGG |
| EGF | 40 | g-ACCATAAATATCCT-GTTTTAGAGCTA- |
| | | CCATAGCGGTACTATCGGCATCT- |
| | | TTTTTTTTcagccaactccaaTTTTTTTT- |
| | | AGATGCCGATAGTACCGCTATGG |
| EGF | 41 | -GAACTGCTAAATAT-GTTTTAGAGCTA- |
| | | CCTCGTACTAGTCTCGCATGACC- |
| | | TTTTTTTTcagccaactccaaTTTTTTTT- |
| | | GGTCATGCGAGACTAGTACGAGG |
| EGF | 42 | g-CAATTCCTCCACAC-GTTTTAGAGCTA- |
| | | CCTCGTACTAGTCTCGCATGACC- |
| | | TTTTTTTTcagccaactccaaTTTTTTTT- |
| | | GGTCATGCGAGACTAGTACGAGG |
| EGF | 43 | g-TCAAGTGTCACTAA-GTTTTAGAGCTA- |
| | | CCTCGTACTAGTCTCGCATGACC- |
| | | TTTTTTTTcagccaactccaaTTTTTTTT- |
| | | GGTCATGCGAGACTAGTACGAGG |
| EGF | 44 | g-ACCATAAATATCCT-GTTTTAGAGCTA- |
| | | CCTCGTACTAGTCTCGCATGACC- |
| | | TTTTTTTTcagccaactccaaTTTTTTTT- |
| | | GGTCATGCGAGACTAGTACGAGG |
| EGF | 45 | -GAACTGCTAAATAT-GTTTTAGAGCTA- |
| | | CCGATAGTGCTAAACGACGCTTT- |
| | | TTTTTTTTcagccaactccaaTTTTTTTT- |
| | | AAAGCGTCGTTTAGCACTATCGG |
| EGF | 46 | g-CAATTCCTCCACAC-GTTTTAGAGCTA- |
| | | CCGATAGTGCTAAACGACGCTTT- |
| | | TTTTTTTTcagccaactccaaTTTTTTTT- |
| | | AAAGCGTCGTTTAGCACTATCGG |
| EGF | 47 | g-TCAAGTGTCACTAA-GTTTTAGAGCTA- |
| | | CCGATAGTGCTAAACGACGCTTT- |
| | | TTTTTTTTcagccaactccaaTTTTTTTT- |
| | | AAAGCGTCGTTTAGCACTATCGG |
| EGF | 48 | g-ACCATAAATATCCT-GTTTTAGAGCTA- |
| | | CCGATAGTGCTAAACGACGCTTT- |
| | | TTTTTTTTcagccaactccaaTTTTTTTT- |
| | | AAAGCGTCGTTTAGCACTATCGG |
| EGF | 49 | -GAACTGCTAAATAT-GTTTTAGAGCTA- |
| | | CCCGTTATCGACGTTCAAGGAAC- |
| | | TTTTTTTTcagccaactccaaTTTTTTTT- |
| | | GTTCCTTGAACGTCGATAACGGG |
| EGF | 50 | g-CAATTCCTCCACAC-GTTTTAGAGCTA- |
| | | CCCGTTATCGACGTTCAAGGAAC- |
| | | TTTTTTTTcagccaactccaaTTTTTTTT- |
| | | GTTCCTTGAACGTCGATAACGGG |
| EGF | 51 | g-TCAAGTGTCACTAA-GTTTTAGAGCTA- |
| | | CCCGTTATCGACGTTCAAGGAAC- |
| | | TTTTTTTTcagccaactccaaTTTTTTTT- |
| | | GTTCCTTGAACGTCGATAACGGG |
| EGF | 52 | g-ACCATAAATATCCT-GTTTTAGAGCTA- |
| | | CCCGTTATCGACGTTCAAGGAAC- |
| | | TTTTTTTTcagccaactccaaTTTTTTTT- |
| | | GTTCCTTGAACGTCGATAACGGG |
| EGF | 53 | -GAACTGCTAAATAT-GTTTTAGAGCTA- |
| | | CCGATCAATGCGGTCTGCGTAAC- |
| | | TTTTTTTTcagccaactccaaTTTTTTTT- |
| | | GTTACGCAGACCGCATTGATCGG |
| EGF | 54 | g-CAATTCCTCCACAC-GTTTTAGAGCTA- |
| | | CCGATCAATGCGGTCTGCGTAAC- |
| | | TTTTTTTTcagccaactccaaTTTTTTTT- |
| | | GTTACGCAGACCGCATTGATCGG |
| EGF | 55 | g-TCAAGTGTCACTAA-GTTTTAGAGCTA- |
| | | CCGATCAATGCGGTCTGCGTAAC- |
| | | TTTTTTTTcagccaactccaaTTTTTTTT- |
| | | GTTACGCAGACCGCATTGATCGG |
| EGF | 56 | g-ACCATAAATATCCT-GTTTTAGAGCTA- |
| | | CCGATCAATGCGGTCTGCGTAAC- |
| | | TTTTTTTTcagccaactccaaTTTTTTTT- |
| | | GTTACGCAGACCGCATTGATCGG |
| EGF | 57 | -GAACTGCTAAATAT-GTTTTAGAGCTA- |
| | | CCCTTACTCGCGATACTCTCGAC- |
| | | TTTTTTTTcagccaactccaaTTTTTTTT- |
| | | GTCGAGAGTATCGCGAGTAAGGG |
| EGF | 58 | g-CAATTCCTCCACAC-GTTTTAGAGCTA- |
| | | CCCTTACTCGCGATACTCTCGAC- |
| | | TTTTTTTTcagccaactccaaTTTTTTTT- |
| | | GTCGAGAGTATCGCGAGTAAGGG |
| EGF | 59 | g-TCAAGTGTCACTAA-GTTTTAGAGCTA- |
| | | CCCTTACTCGCGATACTCTCGAC- |
| | | TTTTTTTTcagccaactccaaTTTTTTTT- |
| | | GTCGAGAGTATCGCGAGTAAGGG |
| EGF | 60 | g-ACCATAAATATCCT-GTTTTAGAGCTA- |
| | | CCCTTACTCGCGATACTCTCGAC- |
| | | TTTTTTTTcagccaactccaaTTTTTTTT- |
| | | GTCGAGAGTATCGCGAGTAAGGG |
| EGF | 61 | -GAACTGCTAAATAT-GTTTTAGAGCTA- |
| | | CCGCGGACGGTAAGCACGGAATA- |
| | | TTTTTTTTcagccaactccaaTTTTTTTT- |
| | | TATTCCGTGCTTACCGTCCGCGG |
| EGF | 62 | g-CAATTCCTCCACAC-GTTTTAGAGCTA- |
| | | CCGCGGACGGTAAGCACGGAATA- |
| | | TTTTTTTTcagccaactccaaTTTTTTTT- |
| | | TATTCCGTGCTTACCGTCCGCGG |
| EGF | 63 | g-TCAAGTGTCACTAA-GTTTTAGAGCTA- |
| | | CCGCGGACGGTAAGCACGGAATA- |
| | | TTTTTTTTcagccaactccaaTTTTTTTT- |
| | | TATTCCGTGCTTACCGTCCGCGG |
| EGF | 64 | g-ACCATAAATATCCT-GTTTTAGAGCTA- |
| | | CCGCGGACGGTAAGCACGGAATA- |
| | | TTTTTTTTcagccaactccaaTTTTTTTT- |
| | | TATTCCGTGCTTACCGTCCGCGG |
| EGF | 65 | -GAACTGCTAAATAT-GTTTTAGAGCTA- |
| | | CCTATAGTCACGAATCGTAGGGT- |
| | | TTTTTTTTcagccaactccaaTTTTTTTT- |
| | | ACCCTACGATTCGTGACTATAGG |
| EGF | 66 | g-CAATTCCTCCACAC-GTTTTAGAGCTA- |
| | | CCTATAGTCACGAATCGTAGGGT- |
| | | TTTTTTTTcagccaactccaaTTTTTTTT- |
| | | ACCCTACGATTCGTGACTATAGG |
| EGF | 67 | g-TCAAGTGTCACTAA-GTTTTAGAGCTA- |
| | | CCTATAGTCACGAATCGTAGGGT- |
| | | TTTTTTTTcagccaactccaaTTTTTTTT- |
| | | ACCCTACGATTCGTGACTATAGG |
| EGF | 68 | g-ACCATAAATATCCT-GTTTTAGAGCTA- |
| | | CCTATAGTCACGAATCGTAGGGT- |
| | | TTTTTTTTcagccaactccaaTTTTTTTT- |
| | | ACCCTACGATTCGTGACTATAGG |
| EGF | 69 | -GAACTGCTAAATAT-GTTTTAGAGCTA- |
| | | CCCGTCGTCACGTATGCGTAGCA- |
| | | TTTTTTTTcagccaactccaaTTTTTTTT- |
| | | TGCTACGCATACGTGACGACGGG |
| EGF | 70 | g-CAATTCCTCCACAC-GTTTTAGAGCTA- |
| | | CCCGTCGTCACGTATGCGTAGCA- |
| | | TTTTTTTTcagccaactccaaTTTTTTTT- |
| | | TGCTACGCATACGTGACGACGGG |
| EGF | 71 | g-TCAAGTGTCACTAA-GTTTTAGAGCTA- |
| | | CCCGTCGTCACGTATGCGTAGCA- |
| | | TTTTTTTTcagccaactccaaTTTTTTTT- |
| | | TGCTACGCATACGTGACGACGGG |
| EGF | 72 | g-ACCATAAATATCCT-GTTTTAGAGCTA- |
| | | CCCGTCGTCACGTATGCGTAGCA- |
| | | TTTTTTTTcagccaactccaaTTTTTTTT- |
| | | TGCTACGCATACGTGACGACGGG |
| EGF | 73 | -GAACTGCTAAATAT-GTTTTAGAGCTA- |
| | | CCCGAGAGGTAGTAGACGACGCA- |
| | | TTTTTTTTcagccaactccaaTTTTTTTT- |
| | | TGCGTCGTCTACTACCTCTCGGG |
| EGF | 74 | g-CAATTCCTCCACAC-GTTTTAGAGCTA- |
| | | CCCGAGAGGTAGTAGACGACGCA- |
| | | TTTTTTTTcagccaactccaaTTTTTTTT- |
| | | TGCGTCGTCTACTACCTCTCGGG |
| EGF | 75 | g-TCAAGTGTCACTAA-GTTTTAGAGCTA- |
| | | CCCGAGAGGTAGTAGACGACGCA- |
| | | TTTTTTTTcagccaactccaaTTTTTTTT- |
| | | TGCGTCGTCTACTACCTCTCGGG |
| EGF | 76 | g-ACCATAAATATCCT-GTTTTAGAGCTA- |
| | | CCCGAGAGGTAGTAGACGACGCA- |
| | | TTTTTTTTcagccaactccaaTTTTTTTT- |
| | | TGCGTCGTCTACTACCTCTCGGG |
| EGF | 77 | -GAACTGCTAAATAT-GTTTTAGAGCTA- |
| | | CCGACGTCTACGGACGGGAGCTA- |
| | | TTTTTTTTcagccaactccaaTTTTTTTT- |
| | | TAGCTCCCGTCCGTAGACGTCGG |
| EGF | 78 | g-CAATTCCTCCACAC-GTTTTAGAGCTA- |
| | | CCGACGTCTACGGACGGGAGCTA- |
| | | TTTTTTTTcagccaactccaaTTTTTTTT- |
| | | TAGCTCCCGTCCGTAGACGTCGG |
| EGF | 79 | g-TCAAGTGTCACTAA-GTTTTAGAGCTA- |
| | | CCGACGTCTACGGACGGGAGCTA- |
| | | TTTTTTTTcagccaactccaaTTTTTTTT- |
| | | TAGCTCCCGTCCGTAGACGTCGG |
| EGF | 80 | g-ACCATAAATATCCT-GTTTTAGAGCTA- |
| | | CCGACGTCTACGGACGGGAGCTA- |
| | | TTTTTTTTcagccaactccaaTTTTTTTT- |
| | | TAGCTCCCGTCCGTAGACGTCGG |
| EGF | 81 | -GAACTGCTAAATAT-GTTTTAGAGCTA- |
| | | CCAAAGCTCATTCGCGACTGAGC- |
| | | TTTTTTTTcagccaactccaaTTTTTTTT- |
| | | GCTCAGTCGCGAATGAGCTTTGG |
| EGF | 82 | g-CAATTCCTCCACAC-GTTTTAGAGCTA- |
| | | CCAAAGCTCATTCGCGACTGAGC- |
| | | TTTTTTTTcagccaactccaaTTTTTTTT- |
| | | GCTCAGTCGCGAATGAGCTTTGG |
| EGF | 83 | g-TCAAGTGTCACTAA-GTTTTAGAGCTA- |
| | | CCAAAGCTCATTCGCGACTGAGC- |
| | | TTTTTTTTcagccaactccaaTTTTTTTT- |
| | | GCTCAGTCGCGAATGAGCTTTGG |
| EGF | 84 | g-ACCATAAATATCCT-GTTTTAGAGCTA- |
| | | CCAAAGCTCATTCGCGACTGAGC- |
| | | TTTTTTTTcagccaactccaaTTTTTTTT- |
| | | GCTCAGTCGCGAATGAGCTTTGG |
| EGF | 85 | -GAACTGCTAAATAT-GTTTTAGAGCTA- |
| | | CCATGGCACGATCGACACGGAGG- |
| | | TTTTTTTTcagccaactccaaTTTTTTTT- |
| | | CCTCCGTGTCGATCGTGCCATGG |
| EGF | 86 | g-CAATTCCTCCACAC-GTTTTAGAGCTA- |
| | | CCATGGCACGATCGACACGGAGG- |
| | | TTTTTTTTcagccaactccaaTTTTTTTT- |
| | | CCTCCGTGTCGATCGTGCCATGG |
| EGF | 87 | g-TCAAGTGTCACTAA-GTTTTAGAGCTA- |
| | | CCATGGCACGATCGACACGGAGG- |
| | | TTTTTTTTcagccaactccaaTTTTTTTT- |
| | | CCTCCGTGTCGATCGTGCCATGG |
| EGF | 88 | g-ACCATAAATATCCT-GTTTTAGAGCTA- |
| | | CCATGGCACGATCGACACGGAGG- |
| | | TTTTTTTTcagccaactccaaTTTTTTTT- |
| | | CCTCCGTGTCGATCGTGCCATGG |
| EGF | 89 | -GAACTGCTAAATAT-GTTTTAGAGCTA- |
| | | CCCGAACTCTCTATCGAACGAGT- |
| | | TTTTTTTTcagccaactccaaTTTTTTTT- |
| | | ACTCGTTCGATAGAGAGTTCGGG |
| EGF | 90 | g-CAATTCCTCCACAC-GTTTTAGAGCTA- |
| | | CCCGAACTCTCTATCGAACGAGT- |
| | | TTTTTTTTcagccaactccaaTTTTTTTT- |
| | | ACTCGTTCGATAGAGAGTTCGGG |
| EGF | 91 | g-TCAAGTGTCACTAA-GTTTTAGAGCTA- |
| | | CCCGAACTCTCTATCGAACGAGT- |
| | | TTTTTTTTcagccaactccaaTTTTTTTT- |
| | | ACTCGTTCGATAGAGAGTTCGGG |
| EGF | 92 | g-ACCATAAATATCCT-GTTTTAGAGCTA- |
| | | CCCGAACTCTCTATCGAACGAGT- |
| | | TTTTTTTTcagccaactccaaTTTTTTTT- |
| | | ACTCGTTCGATAGAGAGTTCGGG |
| FEV | 93 | g-CGAGCCGTACCAGA-GTTTTAGAGCTA- |
| | | CCGTCGTTGTACCGTCTACTTGAC- |
| | | TTTTTTTTcagccaactccaaTTTTTTTT- |
| | | GTCAAGTAGACGGTACAACGACGG |
| FEV | 94 | g-CCAAGGCTTAAGGG-GTTTTAGAGCTA- |
| | | CCGTCGTTGTACCGTCTACTTGAC- |
| | | TTTTTTTTcagccaactccaaTTTTTTTT- |
| | | GTCAAGTAGACGGTACAACGACGG |
| FEV | 95 | -GCCGACTGGAAGAA-GTTTTAGAGCTA- |
| | | CCGTCGTTGTACCGTCTACTTGAC- |
| | | TTTTTTTTcagccaactccaaTTTTTTTT- |
| | | GTCAAGTAGACGGTACAACGACGG |
| FEV | 96 | g-CTGCAAACAGTGAT-GTTTTAGAGCTA- |
| | | CCGTCGTTGTACCGTCTACTTGAC- |
| | | TTTTTTTTcagccaactccaaTTTTTTTT- |
| | | GTCAAGTAGACGGTACAACGACGG |
| FEV | 97 | g-CGAGCCGTACCAGA-GTTTTAGAGCTA- |
| | | CCTACACTCGACATCGGTAGCTA- |
| | | TTTTTTTTcagccaactccaaTTTTTTTT- |
| | | TAGCTACCGATGTCGAGTGTAGG |
| FEV | 98 | g-CCAAGGCTTAAGGG-GTTTTAGAGCTA- |
| | | CCTACACTCGACATCGGTAGCTA- |
| | | TTTTTTTTcagccaactccaaTTTTTTTT- |
| | | TAGCTACCGATGTCGAGTGTAGG |
| FEV | 99 | -GCCGACTGGAAGAA-GTTTTAGAGCTA- |
| | | CCTACACTCGACATCGGTAGCTA- |
| | | TTTTTTTTcagccaactccaaTTTTTTTT- |
| | | TAGCTACCGATGTCGAGTGTAGG |
| FEV | 100 | g-CTGCAAACAGTGAT-GTTTTAGAGCTA- |
| | | CCTACACTCGACATCGGTAGCTA- |
| | | TTTTTTTTcagccaactccaaTTTTTTTT- |
| | | TAGCTACCGATGTCGAGTGTAGG |
| FEV | 101 | g-CGAGCCGTACCAGA-GTTTTAGAGCTA- |
| | | CCCTGGCGGAACGTTCGAGTAAT- |
| | | TTTTTTTTcagccaactccaaTTTTTTTT- |
| | | ATTACTCGAACGTTCCGCCAGGG |
| FEV | 102 | g-CCAAGGCTTAAGGG-GTTTTAGAGCTA- |
| | | CCCTGGCGGAACGTTCGAGTAAT- |
| | | TTTTTTTTcagccaactccaaTTTTTTTT- |
| | | ATTACTCGAACGTTCCGCCAGGG |
| FEV | 103 | -GCCGACTGGAAGAA-GTTTTAGAGCTA- |
| | | CCCTGGCGGAACGTTCGAGTAAT- |
| | | TTTTTTTTcagccaactccaaTTTTTTTT- |
| | | ATTACTCGAACGTTCCGCCAGGG |
| FEV | 104 | g-CTGCAAACAGTGAT-GTTTTAGAGCTA- |
| | | CCCTGGCGGAACGTTCGAGTAAT- |
| | | TTTTTTTTcagccaactccaaTTTTTTTT- |
| | | ATTACTCGAACGTTCCGCCAGGG |
| FEV | 105 | g-CGAGCCGTACCAGA-GTTTTAGAGCTA- |
| | | CCTACACGATAGTGGTCGTGCGC- |
| | | TTTTTTTTcagccaactccaaTTTTTTTT- |
| | | GCGCACGACCACTATCGTGTAGG |
| FEV | 106 | g-CCAAGGCTTAAGGG-GTTTTAGAGCTA- |
| | | CCTACACGATAGTGGTCGTGCGC- |
| | | TTTTTTTTcagccaactccaaTTTTTTTT- |
| | | GCGCACGACCACTATCGTGTAGG |
| FEV | 107 | -GCCGACTGGAAGAA-GTTTTAGAGCTA- |
| | | CCTACACGATAGTGGTCGTGCGC- |
| | | TTTTTTTTcagccaactccaaTTTTTTTT- |
| | | GCGCACGACCACTATCGTGTAGG |
| FEV | 108 | g-CTGCAAACAGTGAT-GTTTTAGAGCTA- |
| | | CCTACACGATAGTGGTCGTGCGC- |
| | | TTTTTTTTcagccaactccaaTTTTTTTT- |
| | | GCGCACGACCACTATCGTGTAGG |
| FEV | 109 | g-CGAGCCGTACCAGA-GTTTTAGAGCTA- |
| | | CCTTCCCGACTTCCGTAGGAGCGC- |
| | | TTTTTTTTcagccaactccaaTTTTTTTT- |
| | | GCGCTCCTACGGAAGTCGGGAAGG |
| FEV | 110 | g-CCAAGGCTTAAGGG-GTTTTAGAGCTA- |
| | | CCTTCCCGACTTCCGTAGGAGCGC- |
| | | TTTTTTTTcagccaactccaaTTTTTTTT- |
| | | GCGCTCCTACGGAAGTCGGGAAGG |
| FEV | 111 | -GCCGACTGGAAGAA-GTTTTAGAGCTA- |
| | | CCTTCCCGACTTCCGTAGGAGCGC- |
| | | TTTTTTTTcagccaactccaaTTTTTTTT- |
| | | GCGCTCCTACGGAAGTCGGGAAGG |
| FEV | 112 | g-CTGCAAACAGTGAT-GTTTTAGAGCTA- |
| | | CCTTCCCGACTTCCGTAGGAGCGC- |
| | | TTTTTTTTcagccaactccaaTTTTTTTT- |
| | | GCGCTCCTACGGAAGTCGGGAAGG |
| FEV | 113 | g-CGAGCCGTACCAGA-GTTTTAGAGCTA- |
| | | CCTGAAGGTAAAGATCGGGTCCTC- |
| | | TTTTTTTTcagccaactccaaTTTTTTTT- |
| | | GAGGACCCGATCTTTACCTTCAGG |
| FEV | 114 | g-CCAAGGCTTAAGGG-GTTTTAGAGCTA- |
| | | CCTGAAGGTAAAGATCGGGTCCTC- |
| | | TTTTTTTTcagccaactccaaTTTTTTTT- |
| | | GAGGACCCGATCTTTACCTTCAGG |
| FEV | 115 | -GCCGACTGGAAGAA-GTTTTAGAGCTA- |
| | | CCTGAAGGTAAAGATCGGGTCCTC- |
| | | TTTTTTTTcagccaactccaaTTTTTTTT- |
| | | GAGGACCCGATCTTTACCTTCAGG |
| FEV | 116 | g-CTGCAAACAGTGAT-GTTTTAGAGCTA- |
| | | CCTGAAGGTAAAGATCGGGTCCTC- |
| | | TTTTTTTTcagccaactccaaTTTTTTTT- |
| | | GAGGACCCGATCTTTACCTTCAGG |
| FEV | 117 | g-CGAGCCGTACCAGA-GTTTTAGAGCTA- |
| | | CCTGGTTATAGCGGACGCACTGT- |
| | | TTTTTTTTcagccaactccaaTTTTTTTT- |
| | | ACAGTGCGTCCGCTATAACCAGG |
| FEV | 118 | g-CCAAGGCTTAAGGG-GTTTTAGAGCTA- |
| | | CCTGGTTATAGCGGACGCACTGT- |
| | | TTTTTTTTcagccaactccaaTTTTTTTT- |
| | | ACAGTGCGTCCGCTATAACCAGG |
| FEV | 119 | -GCCGACTGGAAGAA-GTTTTAGAGCTA- |
| | | CCTGGTTATAGCGGACGCACTGT- |
| | | TTTTTTTTcagccaactccaaTTTTTTTT- |
| | | ACAGTGCGTCCGCTATAACCAGG |
| FEV | 120 | g-CTGCAAACAGTGAT-GTTTTAGAGCTA- |
| | | CCTGGTTATAGCGGACGCACTGT- |
| | | TTTTTTTTcagccaactccaaTTTTTTTT- |
| | | ACAGTGCGTCCGCTATAACCAGG |
| FEV | 121 | g-CGAGCCGTACCAGA-GTTTTAGAGCTA- |
| | | CCGCATCGTATTATCTGCGAAGC- |
| | | TTTTTTTTcagccaactccaaTTTTTTTT- |
| | | GCTTCGCAGATAATACGATGCGG |
| FEV | 122 | g-CCAAGGCTTAAGGG-GTTTTAGAGCTA- |
| | | CCGCATCGTATTATCTGCGAAGC- |
| | | TTTTTTTTcagccaactccaaTTTTTTTT- |
| | | GCTTCGCAGATAATACGATGCGG |
| FEV | 123 | -GCCGACTGGAAGAA-GTTTTAGAGCTA- |
| | | CCGCATCGTATTATCTGCGAAGC- |
| | | TTTTTTTTcagccaactccaaTTTTTTTT- |
| | | GCTTCGCAGATAATACGATGCGG |
| FEV | 124 | g-CTGCAAACAGTGAT-GTTTTAGAGCTA- |
| | | CCGCATCGTATTATCTGCGAAGC- |
| | | TTTTTTTTcagccaactccaaTTTTTTTT- |
| | | GCTTCGCAGATAATACGATGCGG |
| FEV | 125 | g-CGAGCCGTACCAGA-GTTTTAGAGCTA- |
| | | CCGCTAGGACGTTCAACGGAGTC- |
| | | TTTTTTTTcagccaactccaaTTTTTTTT- |
| | | GACTCCGTTGAACGTCCTAGCGG |
| FEV | 126 | g-CCAAGGCTTAAGGG-GTTTTAGAGCTA- |
| | | CCGCTAGGACGTTCAACGGAGTC- |
| | | TTTTTTTTcagccaactccaaTTTTTTTT- |
| | | GACTCCGTTGAACGTCCTAGCGG |
| FEV | 127 | -GCCGACTGGAAGAA-GTTTTAGAGCTA- |
| | | CCGCTAGGACGTTCAACGGAGTC- |
| | | TTTTTTTTcagccaactccaaTTTTTTTT- |
| | | GACTCCGTTGAACGTCCTAGCGG |
| FEV | 128 | g-CTGCAAACAGTGAT-GTTTTAGAGCTA- |
| | | CCGCTAGGACGTTCAACGGAGTC- |
| | | TTTTTTTTcagccaactccaaTTTTTTTT- |
| | | GACTCCGTTGAACGTCCTAGCGG |
| FEV | 129 | g-CGAGCCGTACCAGA-GTTTTAGAGCTA- |
| | | CCATAGCGGTACTATCGGCATCT- |
| | | TTTTTTTTcagccaactccaaTTTTTTTT- |
| | | AGATGCCGATAGTACCGCTATGG |
| FEV | 130 | g-CCAAGGCTTAAGGG-GTTTTAGAGCTA- |
| | | CCATAGCGGTACTATCGGCATCT- |
| | | TTTTTTTTcagccaactccaaTTTTTTTT- |
| | | AGATGCCGATAGTACCGCTATGG |
| FEV | 131 | -GCCGACTGGAAGAA-GTTTTAGAGCTA- |
| | | CCATAGCGGTACTATCGGCATCT- |
| | | TTTTTTTTcagccaactccaaTTTTTTTT- |
| | | AGATGCCGATAGTACCGCTATGG |
| FEV | 132 | g-CTGCAAACAGTGAT-GTTTTAGAGCTA- |
| | | CCATAGCGGTACTATCGGCATCT- |
| | | TTTTTTTTcagccaactccaaTTTTTTTT- |
| | | AGATGCCGATAGTACCGCTATGG |
| FEV | 133 | g-CGAGCCGTACCAGA-GTTTTAGAGCTA- |
| | | CCTCGTACTAGTCTCGCATGACC- |
| | | TTTTTTTTcagccaactccaaTTTTTTTT- |
| | | GGTCATGCGAGACTAGTACGAGG |
| FEV | 134 | g-CCAAGGCTTAAGGG-GTTTTAGAGCTA- |
| | | CCTCGTACTAGTCTCGCATGACC- |
| | | TTTTTTTTcagccaactccaaTTTTTTTT- |
| | | GGTCATGCGAGACTAGTACGAGG |
| FEV | 135 | -GCCGACTGGAAGAA-GTTTTAGAGCTA- |
| | | CCTCGTACTAGTCTCGCATGACC- |
| | | TTTTTTTTcagccaactccaaTTTTTTTT- |
| | | GGTCATGCGAGACTAGTACGAGG |
| FEV | 136 | g-CTGCAAACAGTGAT-GTTTTAGAGCTA- |
| | | CCTCGTACTAGTCTCGCATGACC- |
| | | TTTTTTTTcagccaactccaaTTTTTTTT- |
| | | GGTCATGCGAGACTAGTACGAGG |
| FEV | 137 | g-CGAGCCGTACCAGA-GTTTTAGAGCTA- |
| | | CCGATAGTGCTAAACGACGCTTT- |
| | | TTTTTTTTcagccaactccaaTTTTTTTT- |
| | | AAAGCGTCGTTTAGCACTATCGG |
| FEV | 138 | g-CCAAGGCTTAAGGG-GTTTTAGAGCTA- |
| | | CCGATAGTGCTAAACGACGCTTT- |
| | | TTTTTTTTcagccaactccaaTTTTTTTT- |
| | | AAAGCGTCGTTTAGCACTATCGG |
| FEV | 139 | -GCCGACTGGAAGAA-GTTTTAGAGCTA- |
| | | CCGATAGTGCTAAACGACGCTTT- |
| | | TTTTTTTTcagccaactccaaTTTTTTTT- |
| | | AAAGCGTCGTTTAGCACTATCGG |
| FEV | 140 | g-CTGCAAACAGTGAT-GTTTTAGAGCTA- |
| | | CCGATAGTGCTAAACGACGCTTT- |
| | | TTTTTTTTcagccaactccaaTTTTTTTT- |
| | | AAAGCGTCGTTTAGCACTATCGG |
| FEV | 141 | g-CGAGCCGTACCAGA-GTTTTAGAGCTA- |
| | | CCCGTTATCGACGTTCAAGGAAC- |
| | | TTTTTTTTcagccaactccaaTTTTTTTT- |
| | | GTTCCTTGAACGTCGATAACGGG |
| FEV | 142 | g-CCAAGGCTTAAGGG-GTTTTAGAGCTA- |
| | | CCCGTTATCGACGTTCAAGGAAC- |
| | | TTTTTTTTcagccaactccaaTTTTTTTT- |
| | | GTTCCTTGAACGTCGATAACGGG |
| FEV | 143 | -GCCGACTGGAAGAA-GTTTTAGAGCTA- |
| | | CCCGTTATCGACGTTCAAGGAAC- |
| | | TTTTTTTTcagccaactccaaTTTTTTTT- |
| | | GTTCCTTGAACGTCGATAACGGG |
| FEV | 144 | g-CTGCAAACAGTGAT-GTTTTAGAGCTA- |
| | | CCCGTTATCGACGTTCAAGGAAC- |
| | | TTTTTTTTcagccaactccaaTTTTTTTT- |
| | | GTTCCTTGAACGTCGATAACGGG |
| FEV | 145 | g-CGAGCCGTACCAGA-GTTTTAGAGCTA- |
| | | CCGATCAATGCGGTCTGCGTAAC- |
| | | TTTTTTTTcagccaactccaaTTTTTTTT- |
| | | GTTACGCAGACCGCATTGATCGG |
| FEV | 146 | g-CCAAGGCTTAAGGG-GTTTTAGAGCTA- |
| | | CCGATCAATGCGGTCTGCGTAAC- |
| | | TTTTTTTTcagccaactccaaTTTTTTTT- |
| | | GTTACGCAGACCGCATTGATCGG |
| FEV | 147 | -GCCGACTGGAAGAA-GTTTTAGAGCTA- |
| | | CCGATCAATGCGGTCTGCGTAAC- |
| | | TTTTTTTTcagccaactccaaTTTTTTTT- |
| | | GTTACGCAGACCGCATTGATCGG |
| FEV | 148 | g-CTGCAAACAGTGAT-GTTTTAGAGCTA- |
| | | CCGATCAATGCGGTCTGCGTAAC- |
| | | TTTTTTTTcagccaactccaaTTTTTTTT- |
| | | GTTACGCAGACCGCATTGATCGG |
| FEV | 149 | g-CGAGCCGTACCAGA-GTTTTAGAGCTA- |
| | | CCCTTACTCGCGATACTCTCGAC- |
| | | TTTTTTTTcagccaactccaaTTTTTTTT- |
| | | GTCGAGAGTATCGCGAGTAAGGG |
| FEV | 150 | g-CCAAGGCTTAAGGG-GTTTTAGAGCTA- |
| | | CCCTTACTCGCGATACTCTCGAC- |
| | | TTTTTTTTcagccaactccaaTTTTTTTT- |
| | | GTCGAGAGTATCGCGAGTAAGGG |
| FEV | 151 | -GCCGACTGGAAGAA-GTTTTAGAGCTA- |
| | | CCCTTACTCGCGATACTCTCGAC- |
| | | TTTTTTTTcagccaactccaaTTTTTTTT- |
| | | GTCGAGAGTATCGCGAGTAAGGG |
| FEV | 152 | g-CTGCAAACAGTGAT-GTTTTAGAGCTA- |
| | | CCCTTACTCGCGATACTCTCGAC- |
| | | TTTTTTTTcagccaactccaaTTTTTTTT- |
| | | GTCGAGAGTATCGCGAGTAAGGG |
| FEV | 153 | g-CGAGCCGTACCAGA-GTTTTAGAGCTA- |
| | | CCGCGGACGGTAAGCACGGAATA- |
| | | TTTTTTTTcagccaactccaaTTTTTTTT- |
| | | TATTCCGTGCTTACCGTCCGCGG |
| FEV | 154 | g-CCAAGGCTTAAGGG-GTTTTAGAGCTA- |
| | | CCGCGGACGGTAAGCACGGAATA- |
| | | TTTTTTTTcagccaactccaaTTTTTTTT- |
| | | TATTCCGTGCTTACCGTCCGCGG |
| FEV | 155 | -GCCGACTGGAAGAA-GTTTTAGAGCTA- |
| | | CCGCGGACGGTAAGCACGGAATA- |
| | | TTTTTTTTcagccaactccaaTTTTTTTT- |
| | | TATTCCGTGCTTACCGTCCGCGG |
| FEV | 156 | g-CTGCAAACAGTGAT-GTTTTAGAGCTA- |
| | | CCGCGGACGGTAAGCACGGAATA- |
| | | TTTTTTTTcagccaactccaaTTTTTTTT- |
| | | TATTCCGTGCTTACCGTCCGCGG |
| FEV | 157 | g-CGAGCCGTACCAGA-GTTTTAGAGCTA- |
| | | CCTATAGTCACGAATCGTAGGGT- |
| | | TTTTTTTTcagccaactccaaTTTTTTTT- |
| | | ACCCTACGATTCGTGACTATAGG |
| FEV | 158 | g-CCAAGGCTTAAGGG-GTTTTAGAGCTA- |
| | | CCTATAGTCACGAATCGTAGGGT- |
| | | TTTTTTTTcagccaactccaaTTTTTTTT- |
| | | ACCCTACGATTCGTGACTATAGG |
| FEV | 159 | -GCCGACTGGAAGAA-GTTTTAGAGCTA- |
| | | CCTATAGTCACGAATCGTAGGGT- |
| | | TTTTTTTTcagccaactccaaTTTTTTTT- |
| | | ACCCTACGATTCGTGACTATAGG |
| FEV | 160 | g-CTGCAAACAGTGAT-GTTTTAGAGCTA- |
| | | CCTATAGTCACGAATCGTAGGGT- |
| | | TTTTTTTTcagccaactccaaTTTTTTTT- |
| | | ACCCTACGATTCGTGACTATAGG |
| FEV | 161 | g-CGAGCCGTACCAGA-GTTTTAGAGCTA- |
| | | CCCGTCGTCACGTATGCGTAGCA- |
| | | TTTTTTTTcagccaactccaaTTTTTTTT- |
| | | TGCTACGCATACGTGACGACGGG |
| FEV | 162 | g-CCAAGGCTTAAGGG-GTTTTAGAGCTA- |
| | | CCCGTCGTCACGTATGCGTAGCA- |
| | | TTTTTTTTcagccaactccaaTTTTTTTT- |
| | | TGCTACGCATACGTGACGACGGG |
| FEV | 163 | -GCCGACTGGAAGAA-GTTTTAGAGCTA- |
| | | CCCGTCGTCACGTATGCGTAGCA- |
| | | TTTTTTTTcagccaactccaaTTTTTTTT- |
| | | TGCTACGCATACGTGACGACGGG |
| FEV | 164 | g-CTGCAAACAGTGAT-GTTTTAGAGCTA- |
| | | CCCGTCGTCACGTATGCGTAGCA- |
| | | TTTTTTTTcagccaactccaaTTTTTTTT- |
| | | TGCTACGCATACGTGACGACGGG |
| FEV | 165 | g-CGAGCCGTACCAGA-GTTTTAGAGCTA- |
| | | CCCGAGAGGTAGTAGACGACGCA- |
| | | TTTTTTTTcagccaactccaaTTTTTTTT- |
| | | TGCGTCGTCTACTACCTCTCGGG |
| FEV | 166 | g-CCAAGGCTTAAGGG-GTTTTAGAGCTA- |
| | | CCCGAGAGGTAGTAGACGACGCA- |
| | | TTTTTTTTcagccaactccaaTTTTTTTT- |
| | | TGCGTCGTCTACTACCTCTCGGG |
| FEV | 167 | -GCCGACTGGAAGAA-GTTTTAGAGCTA- |
| | | CCCGAGAGGTAGTAGACGACGCA- |
| | | TTTTTTTTcagccaactccaaTTTTTTTT- |
| | | TGCGTCGTCTACTACCTCTCGGG |
| FEV | 168 | g-CTGCAAACAGTGAT-GTTTTAGAGCTA- |
| | | CCCGAGAGGTAGTAGACGACGCA- |
| | | TTTTTTTTcagccaactccaaTTTTTTTT- |
| | | TGCGTCGTCTACTACCTCTCGGG |
| FEV | 169 | g-CGAGCCGTACCAGA-GTTTTAGAGCTA- |
| | | CCGACGTCTACGGACGGGAGCTA- |
| | | TTTTTTTTcagccaactccaaTTTTTTTT- |
| | | TAGCTCCCGTCCGTAGACGTCGG |
| FEV | 170 | g-CCAAGGCTTAAGGG-GTTTTAGAGCTA- |
| | | CCGACGTCTACGGACGGGAGCTA- |
| | | TTTTTTTTcagccaactccaaTTTTTTTT- |
| | | TAGCTCCCGTCCGTAGACGTCGG |
| FEV | 171 | -GCCGACTGGAAGAA-GTTTTAGAGCTA- |
| | | CCGACGTCTACGGACGGGAGCTA- |
| | | TTTTTTTTcagccaactccaaTTTTTTTT- |
| | | TAGCTCCCGTCCGTAGACGTCGG |
| FEV | 172 | g-CTGCAAACAGTGAT-GTTTTAGAGCTA- |
| | | CCGACGTCTACGGACGGGAGCTA- |
| | | TTTTTTTTcagccaactccaaTTTTTTTT- |
| | | TAGCTCCCGTCCGTAGACGTCGG |
| FEV | 173 | g-CGAGCCGTACCAGA-GTTTTAGAGCTA- |
| | | CCAAAGCTCATTCGCGACTGAGC- |
| | | TTTTTTTTcagccaactccaaTTTTTTTT- |
| | | GCTCAGTCGCGAATGAGCTTTGG |
| FEV | 174 | g-CCAAGGCTTAAGGG-GTTTTAGAGCTA- |
| | | CCAAAGCTCATTCGCGACTGAGC- |
| | | TTTTTTTTcagccaactccaaTTTTTTTT- |
| | | GCTCAGTCGCGAATGAGCTTTGG |
| FEV | 175 | -GCCGACTGGAAGAA-GTTTTAGAGCTA- |
| | | CCAAAGCTCATTCGCGACTGAGC- |
| | | TTTTTTTTcagccaactccaaTTTTTTTT- |
| | | GCTCAGTCGCGAATGAGCTTTGG |
| FEV | 176 | g-CTGCAAACAGTGAT-GTTTTAGAGCTA- |
| | | CCAAAGCTCATTCGCGACTGAGC- |
| | | TTTTTTTTcagccaactccaaTTTTTTTT- |
| | | GCTCAGTCGCGAATGAGCTTTGG |
| FEV | 177 | g-CGAGCCGTACCAGA-GTTTTAGAGCTA- |
| | | CCATGGCACGATCGACACGGAGG- |
| | | TTTTTTTTcagccaactccaaTTTTTTTT- |
| | | CCTCCGTGTCGATCGTGCCATGG |
| FEV | 178 | g-CCAAGGCTTAAGGG-GTTTTAGAGCTA- |
| | | CCATGGCACGATCGACACGGAGG- |
| | | TTTTTTTTcagccaactccaaTTTTTTTT- |
| | | CCTCCGTGTCGATCGTGCCATGG |
| FEV | 179 | -GCCGACTGGAAGAA-GTTTTAGAGCTA- |
| | | CCATGGCACGATCGACACGGAGG- |
| | | TTTTTTTTcagccaactccaaTTTTTTTT- |
| | | CCTCCGTGTCGATCGTGCCATGG |
| FEV | 180 | g-CTGCAAACAGTGAT-GTTTTAGAGCTA- |
| | | CCATGGCACGATCGACACGGAGG- |
| | | TTTTTTTTcagccaactccaaTTTTTTTT- |
| | | CCTCCGTGTCGATCGTGCCATGG |
| FEV | 181 | g-CGAGCCGTACCAGA-GTTTTAGAGCTA- |
| | | CCCGAACTCTCTATCGAACGAGT- |
| | | TTTTTTTTcagccaactccaaTTTTTTTT- |
| | | ACTCGTTCGATAGAGAGTTCGGG |
| FEV | 182 | g-CCAAGGCTTAAGGG-GTTTTAGAGCTA- |
| | | CCCGAACTCTCTATCGAACGAGT- |
| | | TTTTTTTTcagccaactccaaTTTTTTTT- |
| | | ACTCGTTCGATAGAGAGTTCGGG |
| FEV | 183 | -GCCGACTGGAAGAA-GTTTTAGAGCTA- |
| | | CCCGAACTCTCTATCGAACGAGT- |
| | | TTTTTTTTcagccaactccaaTTTTTTTT- |
| | | ACTCGTTCGATAGAGAGTTCGGG |
| FEV | 184 | g-CTGCAAACAGTGAT-GTTTTAGAGCTA- |
| | | CCCGAACTCTCTATCGAACGAGT- |
| | | TTTTTTTTcagccaactccaaTTTTTTTT- |
| | | ACTCGTTCGATAGAGAGTTCGGG |
| FOXA2 | 185 | g-CGGTAGTTGGAAGT-GTTTTAGAGCTA- |
| | | CCGTCGTTGTACCGTCTACTTGAC- |
| | | TTTTTTTTcagccaactccaaTTTTTTTT- |
| | | GTCAAGTAGACGGTACAACGACGG |
| FOXA2 | 186 | g-CAGCGCCCCGCGGT-GTTTTAGAGCTA- |
| | | CCGTCGTTGTACCGTCTACTTGAC- |
| | | TTTTTTTTcagccaactccaaTTTTTTTT- |
| | | GTCAAGTAGACGGTACAACGACGG |
| FOXA2 | 187 | g-CGCAGTGACGTGGG-GTTTTAGAGCTA- |
| | | CCGTCGTTGTACCGTCTACTTGAC- |
| | | TTTTTTTTcagccaactccaaTTTTTTTT- |
| | | GTCAAGTAGACGGTACAACGACGG |
| FOXA2 | 188 | g-CTGCCCCGGGTCTG-GTTTTAGAGCTA- |
| | | CCGTCGTTGTACCGTCTACTTGAC- |
| | | TTTTTTTTcagccaactccaaTTTTTTTT- |
| | | GTCAAGTAGACGGTACAACGACGG |
| FOXA2 | 189 | g-CGGTAGTTGGAAGT-GTTTTAGAGCTA- |
| | | CCTACACTCGACATCGGTAGCTA- |
| | | TTTTTTTTcagccaactccaaTTTTTTTT- |
| | | TAGCTACCGATGTCGAGTGTAGG |
| FOXA2 | 190 | g-CAGCGCCCCGCGGT-GTTTTAGAGCTA- |
| | | CCTACACTCGACATCGGTAGCTA- |
| | | TTTTTTTTcagccaactccaaTTTTTTTT- |
| | | TAGCTACCGATGTCGAGTGTAGG |
| FOXA2 | 191 | g-CGCAGTGACGTGGG-GTTTTAGAGCTA- |
| | | CCTACACTCGACATCGGTAGCTA- |
| | | TTTTTTTTcagccaactccaaTTTTTTTT- |
| | | TAGCTACCGATGTCGAGTGTAGG |
| FOXA2 | 192 | g-CTGCCCCGGGTCTG-GTTTTAGAGCTA- |
| | | CCTACACTCGACATCGGTAGCTA- |
| | | TTTTTTTTcagccaactccaaTTTTTTTT- |
| | | TAGCTACCGATGTCGAGTGTAGG |
| FOXA2 | 193 | g-CGGTAGTTGGAAGT-GTTTTAGAGCTA- |
| | | CCCTGGCGGAACGTTCGAGTAAT- |
| | | TTTTTTTTcagccaactccaaTTTTTTTT- |
| | | ATTACTCGAACGTTCCGCCAGGG |
| FOXA2 | 194 | g-CAGCGCCCCGCGGT-GTTTTAGAGCTA- |
| | | CCCTGGCGGAACGTTCGAGTAAT- |
| | | TTTTTTTTcagccaactccaaTTTTTTTT- |
| | | ATTACTCGAACGTTCCGCCAGGG |
| FOXA2 | 195 | g-CGCAGTGACGTGGG-GTTTTAGAGCTA- |
| | | CCCTGGCGGAACGTTCGAGTAAT- |
| | | TTTTTTTTcagccaactccaaTTTTTTTT- |
| | | ATTACTCGAACGTTCCGCCAGGG |
| FOXA2 | 196 | g-CTGCCCCGGGTCTG-GTTTTAGAGCTA- |
| | | CCCTGGCGGAACGTTCGAGTAAT- |
| | | TTTTTTTTcagccaactccaaTTTTTTTT- |
| | | ATTACTCGAACGTTCCGCCAGGG |
| FOXA2 | 197 | g-CGGTAGTTGGAAGT-GTTTTAGAGCTA- |
| | | CCTACACGATAGTGGTCGTGCGC- |
| | | TTTTTTTTcagccaactccaaTTTTTTTT- |
| | | GCGCACGACCACTATCGTGTAGG |
| FOXA2 | 198 | g-CAGCGCCCCGCGGT-GTTTTAGAGCTA- |
| | | CCTACACGATAGTGGTCGTGCGC- |
| | | TTTTTTTTcagccaactccaaTTTTTTTT- |
| | | GCGCACGACCACTATCGTGTAGG |
| FOXA2 | 199 | g-CGCAGTGACGTGGG-GTTTTAGAGCTA- |
| | | CCTACACGATAGTGGTCGTGCGC- |
| | | TTTTTTTTcagccaactccaaTTTTTTTT- |
| | | GCGCACGACCACTATCGTGTAGG |
| FOXA2 | 200 | g-CTGCCCCGGGTCTG-GTTTTAGAGCTA- |
| | | CCTACACGATAGTGGTCGTGCGC- |
| | | TTTTTTTTcagccaactccaaTTTTTTTT- |
| | | GCGCACGACCACTATCGTGTAGG |
| FOXA2 | 201 | g-CGGTAGTTGGAAGT-GTTTTAGAGCTA- |
| | | CCTTCCCGACTTCCGTAGGAGCGC- |
| | | TTTTTTTTcagccaactccaaTTTTTTTT- |
| | | GCGCTCCTACGGAAGTCGGGAAGG |
| FOXA2 | 202 | g-CAGCGCCCCGCGGT-GTTTTAGAGCTA- |
| | | CCTTCCCGACTTCCGTAGGAGCGC- |
| | | TTTTTTTTcagccaactccaaTTTTTTTT- |
| | | GCGCTCCTACGGAAGTCGGGAAGG |
| FOXA2 | 203 | g-CGCAGTGACGTGGG-GTTTTAGAGCTA- |
| | | CCTTCCCGACTTCCGTAGGAGCGC- |
| | | TTTTTTTTcagccaactccaaTTTTTTTT- |
| | | GCGCTCCTACGGAAGTCGGGAAGG |
| FOXA2 | 204 | g-CTGCCCCGGGTCTG-GTTTTAGAGCTA- |
| | | CCTTCCCGACTTCCGTAGGAGCGC- |
| | | TTTTTTTTcagccaactccaaTTTTTTTT- |
| | | GCGCTCCTACGGAAGTCGGGAAGG |
| FOXA2 | 205 | g-CGGTAGTTGGAAGT-GTTTTAGAGCTA- |
| | | CCTGAAGGTAAAGATCGGGTCCTC- |
| | | TTTTTTTTcagccaactccaaTTTTTTTT- |
| | | GAGGACCCGATCTTTACCTTCAGG |
| FOXA2 | 206 | g-CAGCGCCCCGCGGT-GTTTTAGAGCTA- |
| | | CCTGAAGGTAAAGATCGGGTCCTC- |
| | | TTTTTTTTcagccaactccaaTTTTTTTT- |
| | | GAGGACCCGATCTTTACCTTCAGG |
| FOXA2 | 207 | g-CGCAGTGACGTGGG-GTTTTAGAGCTA- |
| | | CCTGAAGGTAAAGATCGGGTCCTC- |
| | | TTTTTTTTcagccaactccaaTTTTTTTT- |
| | | GAGGACCCGATCTTTACCTTCAGG |
| FOXA2 | 208 | g-CTGCCCCGGGTCTG-GTTTTAGAGCTA- |
| | | CCTGAAGGTAAAGATCGGGTCCTC- |
| | | TTTTTTTTcagccaactccaaTTTTTTTT- |
| | | GAGGACCCGATCTTTACCTTCAGG |
| FOXA2 | 209 | g-CGGTAGTTGGAAGT-GTTTTAGAGCTA- |
| | | CCTGGTTATAGCGGACGCACTGT- |
| | | TTTTTTTTcagccaactccaaTTTTTTTT- |
| | | ACAGTGCGTCCGCTATAACCAGG |
| FOXA2 | 210 | g-CAGCGCCCCGCGGT-GTTTTAGAGCTA- |
| | | CCTGGTTATAGCGGACGCACTGT- |
| | | TTTTTTTTcagccaactccaaTTTTTTTT- |
| | | ACAGTGCGTCCGCTATAACCAGG |
| FOXA2 | 211 | g-CGCAGTGACGTGGG-GTTTTAGAGCTA- |
| | | CCTGGTTATAGCGGACGCACTGT- |
| | | TTTTTTTTcagccaactccaaTTTTTTTT- |
| | | ACAGTGCGTCCGCTATAACCAGG |
| FOXA2 | 212 | g-CTGCCCCGGGTCTG-GTTTTAGAGCTA- |
| | | CCTGGTTATAGCGGACGCACTGT- |
| | | TTTTTTTTcagccaactccaaTTTTTTTT- |
| | | ACAGTGCGTCCGCTATAACCAGG |
| FOXA2 | 213 | g-CGGTAGTTGGAAGT-GTTTTAGAGCTA- |
| | | CCGCATCGTATTATCTGCGAAGC- |
| | | TTTTTTTTcagccaactccaaTTTTTTTT- |
| | | GCTTCGCAGATAATACGATGCGG |
| FOXA2 | 214 | g-CAGCGCCCCGCGGT-GTTTTAGAGCTA- |
| | | CCGCATCGTATTATCTGCGAAGC- |
| | | TTTTTTTTcagccaactccaaTTTTTTTT- |
| | | GCTTCGCAGATAATACGATGCGG |
| FOXA2 | 215 | g-CGCAGTGACGTGGG-GTTTTAGAGCTA- |
| | | CCGCATCGTATTATCTGCGAAGC- |
| | | TTTTTTTTcagccaactccaaTTTTTTTT- |
| | | GCTTCGCAGATAATACGATGCGG |
| FOXA2 | 216 | g-CTGCCCCGGGTCTG-GTTTTAGAGCTA- |
| | | CCGCATCGTATTATCTGCGAAGC- |
| | | TTTTTTTTcagccaactccaaTTTTTTTT- |
| | | GCTTCGCAGATAATACGATGCGG |
| FOXA2 | 217 | g-CGGTAGTTGGAAGT-GTTTTAGAGCTA- |
| | | CCGCTAGGACGTTCAACGGAGTC- |
| | | TTTTTTTTcagccaactccaaTTTTTTTT- |
| | | GACTCCGTTGAACGTCCTAGCGG |
| FOXA2 | 218 | g-CAGCGCCCCGCGGT-GTTTTAGAGCTA- |
| | | CCGCTAGGACGTTCAACGGAGTC- |
| | | TTTTTTTTcagccaactccaaTTTTTTTT- |
| | | GACTCCGTTGAACGTCCTAGCGG |
| FOXA2 | 219 | g-CGCAGTGACGTGGG-GTTTTAGAGCTA- |
| | | CCGCTAGGACGTTCAACGGAGTC- |
| | | TTTTTTTTcagccaactccaaTTTTTTTT- |
| | | GACTCCGTTGAACGTCCTAGCGG |
| FOXA2 | 220 | g-CTGCCCCGGGTCTG-GTTTTAGAGCTA- |
| | | CCGCTAGGACGTTCAACGGAGTC- |
| | | TTTTTTTTcagccaactccaaTTTTTTTT- |
| | | GACTCCGTTGAACGTCCTAGCGG |
| FOXA2 | 221 | g-CGGTAGTTGGAAGT-GTTTTAGAGCTA- |
| | | CCATAGCGGTACTATCGGCATCT- |
| | | TTTTTTTTcagccaactccaaTTTTTTTT- |
| | | AGATGCCGATAGTACCGCTATGG |
| FOXA2 | 222 | g-CAGCGCCCCGCGGT-GTTTTAGAGCTA- |
| | | CCATAGCGGTACTATCGGCATCT- |
| | | TTTTTTTTcagccaactccaaTTTTTTTT- |
| | | AGATGCCGATAGTACCGCTATGG |
| FOXA2 | 223 | g-CGCAGTGACGTGGG-GTTTTAGAGCTA- |
| | | CCATAGCGGTACTATCGGCATCT- |
| | | TTTTTTTTcagccaactccaaTTTTTTTT- |
| | | AGATGCCGATAGTACCGCTATGG |
| FOXA2 | 224 | g-CTGCCCCGGGTCTG-GTTTTAGAGCTA- |
| | | CCATAGCGGTACTATCGGCATCT- |
| | | TTTTTTTTcagccaactccaaTTTTTTTT- |
| | | AGATGCCGATAGTACCGCTATGG |
| FOXA2 | 225 | g-CGGTAGTTGGAAGT-GTTTTAGAGCTA- |
| | | CCTCGTACTAGTCTCGCATGACC- |
| | | TTTTTTTTcagccaactccaaTTTTTTTT- |
| | | GGTCATGCGAGACTAGTACGAGG |
| FOXA2 | 226 | g-CAGCGCCCCGCGGT-GTTTTAGAGCTA- |
| | | CCTCGTACTAGTCTCGCATGACC- |
| | | TTTTTTTTcagccaactccaaTTTTTTTT- |
| | | GGTCATGCGAGACTAGTACGAGG |
| FOXA2 | 227 | g-CGCAGTGACGTGGG-GTTTTAGAGCTA- |
| | | CCTCGTACTAGTCTCGCATGACC- |
| | | TTTTTTTTcagccaactccaaTTTTTTTT- |
| | | GGTCATGCGAGACTAGTACGAGG |
| FOXA2 | 228 | g-CTGCCCCGGGTCTG-GTTTTAGAGCTA- |
| | | CCTCGTACTAGTCTCGCATGACC- |
| | | TTTTTTTTcagccaactccaaTTTTTTTT- |
| | | GGTCATGCGAGACTAGTACGAGG |
| FOXA2 | 229 | g-CGGTAGTTGGAAGT-GTTTTAGAGCTA- |
| | | CCGATAGTGCTAAACGACGCTTT- |
| | | TTTTTTTTcagccaactccaaTTTTTTTT- |
| | | AAAGCGTCGTTTAGCACTATCGG |
| FOXA2 | 230 | g-CAGCGCCCCGCGGT-GTTTTAGAGCTA- |
| | | CCGATAGTGCTAAACGACGCTTT- |
| | | TTTTTTTTcagccaactccaaTTTTTTTT- |
| | | AAAGCGTCGTTTAGCACTATCGG |
| FOXA2 | 231 | g-CGCAGTGACGTGGG-GTTTTAGAGCTA- |
| | | CCGATAGTGCTAAACGACGCTTT- |
| | | TTTTTTTTcagccaactccaaTTTTTTTT- |
| | | AAAGCGTCGTTTAGCACTATCGG |
| FOXA2 | 232 | g-CTGCCCCGGGTCTG-GTTTTAGAGCTA- |
| | | CCGATAGTGCTAAACGACGCTTT- |
| | | TTTTTTTTcagccaactccaaTTTTTTTT- |
| | | AAAGCGTCGTTTAGCACTATCGG |
| FOXA2 | 233 | g-CGGTAGTTGGAAGT-GTTTTAGAGCTA- |
| | | CCCGTTATCGACGTTCAAGGAAC- |
| | | TTTTTTTTcagccaactccaaTTTTTTTT- |
| | | GTTCCTTGAACGTCGATAACGGG |
| FOXA2 | 234 | g-CAGCGCCCCGCGGT-GTTTTAGAGCTA- |
| | | CCCGTTATCGACGTTCAAGGAAC- |
| | | TTTTTTTTcagccaactccaaTTTTTTTT- |
| | | GTTCCTTGAACGTCGATAACGGG |
| FOXA2 | 235 | g-CGCAGTGACGTGGG-GTTTTAGAGCTA- |
| | | CCCGTTATCGACGTTCAAGGAAC- |
| | | TTTTTTTTcagccaactccaaTTTTTTTT- |
| | | GTTCCTTGAACGTCGATAACGGG |
| FOXA2 | 236 | g-CTGCCCCGGGTCTG-GTTTTAGAGCTA- |
| | | CCCGTTATCGACGTTCAAGGAAC- |
| | | TTTTTTTTcagccaactccaaTTTTTTTT- |
| | | GTTCCTTGAACGTCGATAACGGG |
| FOXA2 | 237 | g-CGGTAGTTGGAAGT-GTTTTAGAGCTA- |
| | | CCGATCAATGCGGTCTGCGTAAC- |
| | | TTTTTTTTcagccaactccaaTTTTTTTT- |
| | | GTTACGCAGACCGCATTGATCGG |
| FOXA2 | 238 | g-CAGCGCCCCGCGGT-GTTTTAGAGCTA- |
| | | CCGATCAATGCGGTCTGCGTAAC- |
| | | TTTTTTTTcagccaactccaaTTTTTTTT- |
| | | GTTACGCAGACCGCATTGATCGG |
| FOXA2 | 239 | g-CGCAGTGACGTGGG-GTTTTAGAGCTA- |
| | | CCGATCAATGCGGTCTGCGTAAC- |
| | | TTTTTTTTcagccaactccaaTTTTTTTT- |
| | | GTTACGCAGACCGCATTGATCGG |
| FOXA2 | 240 | g-CTGCCCCGGGTCTG-GTTTTAGAGCTA- |
| | | CCGATCAATGCGGTCTGCGTAAC- |
| | | TTTTTTTTcagccaactccaaTTTTTTTT- |
| | | GTTACGCAGACCGCATTGATCGG |
| FOXA2 | 241 | g-CGGTAGTTGGAAGT-GTTTTAGAGCTA- |
| | | CCCTTACTCGCGATACTCTCGAC- |
| | | TTTTTTTTcagccaactccaaTTTTTTTT- |
| | | GTCGAGAGTATCGCGAGTAAGGG |
| FOXA2 | 242 | g-CAGCGCCCCGCGGT-GTTTTAGAGCTA- |
| | | CCCTTACTCGCGATACTCTCGAC- |
| | | TTTTTTTTcagccaactccaaTTTTTTTT- |
| | | GTCGAGAGTATCGCGAGTAAGGG |
| FOXA2 | 243 | g-CGCAGTGACGTGGG-GTTTTAGAGCTA- |
| | | CCCTTACTCGCGATACTCTCGAC- |
| | | TTTTTTTTcagccaactccaaTTTTTTTT- |
| | | GTCGAGAGTATCGCGAGTAAGGG |
| FOXA2 | 244 | g-CTGCCCCGGGTCTG-GTTTTAGAGCTA- |
| | | CCCTTACTCGCGATACTCTCGAC- |
| | | TTTTTTTTcagccaactccaaTTTTTTTT- |
| | | GTCGAGAGTATCGCGAGTAAGGG |
| FOXA2 | 245 | g-CGGTAGTTGGAAGT-GTTTTAGAGCTA- |
| | | CCGCGGACGGTAAGCACGGAATA- |
| | | TTTTTTTTcagccaactccaaTTTTTTTT- |
| | | TATTCCGTGCTTACCGTCCGCGG |
| FOXA2 | 246 | g-CAGCGCCCCGCGGT-GTTTTAGAGCTA- |
| | | CCGCGGACGGTAAGCACGGAATA- |
| | | TTTTTTTTcagccaactccaaTTTTTTTT- |
| | | TATTCCGTGCTTACCGTCCGCGG |
| FOXA2 | 247 | g-CGCAGTGACGTGGG-GTTTTAGAGCTA- |
| | | CCGCGGACGGTAAGCACGGAATA- |
| | | TTTTTTTTcagccaactccaaTTTTTTTT- |
| | | TATTCCGTGCTTACCGTCCGCGG |
| FOXA2 | 248 | g-CTGCCCCGGGTCTG-GTTTTAGAGCTA- |
| | | CCGCGGACGGTAAGCACGGAATA- |
| | | TTTTTTTTcagccaactccaaTTTTTTTT- |
| | | TATTCCGTGCTTACCGTCCGCGG |
| FOXA2 | 249 | g-CGGTAGTTGGAAGT-GTTTTAGAGCTA- |
| | | CCTATAGTCACGAATCGTAGGGT- |
| | | TTTTTTTTcagccaactccaaTTTTTTTT- |
| | | ACCCTACGATTCGTGACTATAGG |
| FOXA2 | 250 | g-CAGCGCCCCGCGGT-GTTTTAGAGCTA- |
| | | CCTATAGTCACGAATCGTAGGGT- |
| | | TTTTTTTTcagccaactccaaTTTTTTTT- |
| | | ACCCTACGATTCGTGACTATAGG |
| FOXA2 | 251 | g-CGCAGTGACGTGGG-GTTTTAGAGCTA- |
| | | CCTATAGTCACGAATCGTAGGGT- |
| | | TTTTTTTTcagccaactccaaTTTTTTTT- |
| | | ACCCTACGATTCGTGACTATAGG |
| FOXA2 | 252 | g-CTGCCCCGGGTCTG-GTTTTAGAGCTA- |
| | | CCTATAGTCACGAATCGTAGGGT- |
| | | TTTTTTTTcagccaactccaaTTTTTTTT- |
| | | ACCCTACGATTCGTGACTATAGG |
| FOXA2 | 253 | g-CGGTAGTTGGAAGT-GTTTTAGAGCTA- |
| | | CCCGTCGTCACGTATGCGTAGCA- |
| | | TTTTTTTTcagccaactccaaTTTTTTTT- |
| | | TGCTACGCATACGTGACGACGGG |
| FOXA2 | 254 | g-CAGCGCCCCGCGGT-GTTTTAGAGCTA- |
| | | CCCGTCGTCACGTATGCGTAGCA- |
| | | TTTTTTTTcagccaactccaaTTTTTTTT- |
| | | TGCTACGCATACGTGACGACGGG |
| FOXA2 | 255 | g-CGCAGTGACGTGGG-GTTTTAGAGCTA- |
| | | CCCGTCGTCACGTATGCGTAGCA- |
| | | TTTTTTTTcagccaactccaaTTTTTTTT- |
| | | TGCTACGCATACGTGACGACGGG |
| FOXA2 | 256 | g-CTGCCCCGGGTCTG-GTTTTAGAGCTA- |
| | | CCCGTCGTCACGTATGCGTAGCA- |
| | | TTTTTTTTcagccaactccaaTTTTTTTT- |
| | | TGCTACGCATACGTGACGACGGG |
| FOXA2 | 257 | g-CGGTAGTTGGAAGT-GTTTTAGAGCTA- |
| | | CCCGAGAGGTAGTAGACGACGCA- |
| | | TTTTTTTTcagccaactccaaTTTTTTTT- |
| | | TGCGTCGTCTACTACCTCTCGGG |
| FOXA2 | 258 | g-CAGCGCCCCGCGGT-GTTTTAGAGCTA- |
| | | CCCGAGAGGTAGTAGACGACGCA- |
| | | TTTTTTTTcagccaactccaaTTTTTTTT- |
| | | TGCGTCGTCTACTACCTCTCGGG |
| FOXA2 | 259 | g-CGCAGTGACGTGGG-GTTTTAGAGCTA- |
| | | CCCGAGAGGTAGTAGACGACGCA- |
| | | TTTTTTTTcagccaactccaaTTTTTTTT- |
| | | TGCGTCGTCTACTACCTCTCGGG |
| FOXA2 | 260 | g-CTGCCCCGGGTCTG-GTTTTAGAGCTA- |
| | | CCCGAGAGGTAGTAGACGACGCA- |
| | | TTTTTTTTcagccaactccaaTTTTTTTT- |
| | | TGCGTCGTCTACTACCTCTCGGG |
| FOXA2 | 261 | g-CGGTAGTTGGAAGT-GTTTTAGAGCTA- |
| | | CCGACGTCTACGGACGGGAGCTA- |
| | | TTTTTTTTcagccaactccaaTTTTTTTT- |
| | | TAGCTCCCGTCCGTAGACGTCGG |
| FOXA2 | 262 | g-CAGCGCCCCGCGGT-GTTTTAGAGCTA- |
| | | CCGACGTCTACGGACGGGAGCTA- |
| | | TTTTTTTTcagccaactccaaTTTTTTTT- |
| | | TAGCTCCCGTCCGTAGACGTCGG |
| FOXA2 | 263 | g-CGCAGTGACGTGGG-GTTTTAGAGCTA- |
| | | CCGACGTCTACGGACGGGAGCTA- |
| | | TTTTTTTTcagccaactccaaTTTTTTTT- |
| | | TAGCTCCCGTCCGTAGACGTCGG |
| FOXA2 | 264 | g-CTGCCCCGGGTCTG-GTTTTAGAGCTA- |
| | | CCGACGTCTACGGACGGGAGCTA- |
| | | TTTTTTTTcagccaactccaaTTTTTTTT- |
| | | TAGCTCCCGTCCGTAGACGTCGG |
| FOXA2 | 265 | g-CGGTAGTTGGAAGT-GTTTTAGAGCTA- |
| | | CCAAAGCTCATTCGCGACTGAGC- |
| | | TTTTTTTTcagccaactccaaTTTTTTTT- |
| | | GCTCAGTCGCGAATGAGCTTTGG |
| FOXA2 | 266 | g-CAGCGCCCCGCGGT-GTTTTAGAGCTA- |
| | | CCAAAGCTCATTCGCGACTGAGC- |
| | | TTTTTTTTcagccaactccaaTTTTTTTT- |
| | | GCTCAGTCGCGAATGAGCTTTGG |
| FOXA2 | 267 | g-CGCAGTGACGTGGG-GTTTTAGAGCTA- |
| | | CCAAAGCTCATTCGCGACTGAGC- |
| | | TTTTTTTTcagccaactccaaTTTTTTTT- |
| | | GCTCAGTCGCGAATGAGCTTTGG |
| FOXA2 | 268 | g-CTGCCCCGGGTCTG-GTTTTAGAGCTA- |
| | | CCAAAGCTCATTCGCGACTGAGC- |
| | | TTTTTTTTcagccaactccaaTTTTTTTT- |
| | | GCTCAGTCGCGAATGAGCTTTGG |
| FOXA2 | 269 | g-CGGTAGTTGGAAGT-GTTTTAGAGCTA- |
| | | CCATGGCACGATCGACACGGAGG- |
| | | TTTTTTTTcagccaactccaaTTTTTTTT- |
| | | CCTCCGTGTCGATCGTGCCATGG |
| FOXA2 | 270 | g-CAGCGCCCCGCGGT-GTTTTAGAGCTA- |
| | | CCATGGCACGATCGACACGGAGG- |
| | | TTTTTTTTcagccaactccaaTTTTTTTT- |
| | | CCTCCGTGTCGATCGTGCCATGG |
| FOXA2 | 271 | g-CGCAGTGACGTGGG-GTTTTAGAGCTA- |
| | | CCATGGCACGATCGACACGGAGG- |
| | | TTTTTTTTcagccaactccaaTTTTTTTT- |
| | | CCTCCGTGTCGATCGTGCCATGG |
| FOXA2 | 272 | g-CTGCCCCGGGTCTG-GTTTTAGAGCTA- |
| | | CCATGGCACGATCGACACGGAGG- |
| | | TTTTTTTTcagccaactccaaTTTTTTTT- |
| | | CCTCCGTGTCGATCGTGCCATGG |
| FOXA2 | 273 | g-CGGTAGTTGGAAGT-GTTTTAGAGCTA- |
| | | CCCGAACTCTCTATCGAACGAGT- |
| | | TTTTTTTTcagccaactccaaTTTTTTTT- |
| | | ACTCGTTCGATAGAGAGTTCGGG |
| FOXA2 | 274 | g-CAGCGCCCCGCGGT-GTTTTAGAGCTA- |
| | | CCCGAACTCTCTATCGAACGAGT- |
| | | TTTTTTTTcagccaactccaaTTTTTTTT- |
| | | ACTCGTTCGATAGAGAGTTCGGG |
| FOXA2 | 275 | g-CGCAGTGACGTGGG-GTTTTAGAGCTA- |
| | | CCCGAACTCTCTATCGAACGAGT- |
| | | TTTTTTTTcagccaactccaaTTTTTTTT- |
| | | ACTCGTTCGATAGAGAGTTCGGG |
| FOXA2 | 276 | g-CTGCCCCGGGTCTG-GTTTTAGAGCTA- |
| | | CCCGAACTCTCTATCGAACGAGT- |
| | | TTTTTTTTcagccaactccaaTTTTTTTT- |
| | | ACTCGTTCGATAGAGAGTTCGGG |
| GATA4 | 277 | -GATTGGGTTCGCTG-GTTTTAGAGCTA- |
| | | CCGTCGTTGTACCGTCTACTTGAC- |
| | | TTTTTTTTcagccaactccaaTTTTTTTT- |
| | | GTCAAGTAGACGGTACAACGACGG |
| GATA4 | 278 | g-CCTCCGCTGGGCGC-GTTTTAGAGCTA- |
| | | CCGTCGTTGTACCGTCTACTTGAC- |
| | | TTTTTTTTcagccaactccaaTTTTTTTT- |
| | | GTCAAGTAGACGGTACAACGACGG |
| GATA4 | 279 | -GCAACTCGGCCCTA-GTTTTAGAGCTA- |
| | | CCGTCGTTGTACCGTCTACTTGAC- |
| | | TTTTTTTTcagccaactccaaTTTTTTTT- |
| | | GTCAAGTAGACGGTACAACGACGG |
| GATA4 | 280 | -GGGATGAGGACCAC-GTTTTAGAGCTA- |
| | | CCGTCGTTGTACCGTCTACTTGAC- |
| | | TTTTTTTTcagccaactccaaTTTTTTTT- |
| | | GTCAAGTAGACGGTACAACGACGG |
| GATA4 | 281 | -GATTGGGTTCGCTG-GTTTTAGAGCTA- |
| | | CCTACACTCGACATCGGTAGCTA- |
| | | TTTTTTTTcagccaactccaaTTTTTTTT- |
| | | TAGCTACCGATGTCGAGTGTAGG |
| GATA4 | 282 | g-CCTCCGCTGGGCGC-GTTTTAGAGCTA- |
| | | CCTACACTCGACATCGGTAGCTA- |
| | | TTTTTTTTcagccaactccaaTTTTTTTT- |
| | | TAGCTACCGATGTCGAGTGTAGG |
| GATA4 | 283 | -GCAACTCGGCCCTA-GTTTTAGAGCTA- |
| | | CCTACACTCGACATCGGTAGCTA- |
| | | TTTTTTTTcagccaactccaaTTTTTTTT- |
| | | TAGCTACCGATGTCGAGTGTAGG |
| GATA4 | 284 | -GGGATGAGGACCAC-GTTTTAGAGCTA- |
| | | CCTACACTCGACATCGGTAGCTA- |
| | | TTTTTTTTcagccaactccaaTTTTTTTT- |
| | | TAGCTACCGATGTCGAGTGTAGG |
| GATA4 | 285 | -GATTGGGTTCGCTG-GTTTTAGAGCTA- |
| | | CCCTGGCGGAACGTTCGAGTAAT- |
| | | TTTTTTTTcagccaactccaaTTTTTTTT- |
| | | ATTACTCGAACGTTCCGCCAGGG |
| GATA4 | 286 | g-CCTCCGCTGGGCGC-GTTTTAGAGCTA- |
| | | CCCTGGCGGAACGTTCGAGTAAT- |
| | | TTTTTTTTcagccaactccaaTTTTTTTT- |
| | | ATTACTCGAACGTTCCGCCAGGG |
| GATA4 | 287 | -GCAACTCGGCCCTA-GTTTTAGAGCTA- |
| | | CCCTGGCGGAACGTTCGAGTAAT- |
| | | TTTTTTTTcagccaactccaaTTTTTTTT- |
| | | ATTACTCGAACGTTCCGCCAGGG |
| GATA4 | 288 | -GGGATGAGGACCAC-GTTTTAGAGCTA- |
| | | CCCTGGCGGAACGTTCGAGTAAT- |
| | | TTTTTTTTcagccaactccaaTTTTTTTT- |
| | | ATTACTCGAACGTTCCGCCAGGG |
| GATA4 | 289 | -GATTGGGTTCGCTG-GTTTTAGAGCTA- |
| | | CCTACACGATAGTGGTCGTGCGC- |
| | | TTTTTTTTcagccaactccaaTTTTTTTT- |
| | | GCGCACGACCACTATCGTGTAGG |
| GATA4 | 290 | g-CCTCCGCTGGGCGC-GTTTTAGAGCTA- |
| | | CCTACACGATAGTGGTCGTGCGC- |
| | | TTTTTTTTcagccaactccaaTTTTTTTT- |
| | | GCGCACGACCACTATCGTGTAGG |
| GATA4 | 291 | -GCAACTCGGCCCTA-GTTTTAGAGCTA- |
| | | CCTACACGATAGTGGTCGTGCGC- |
| | | TTTTTTTTcagccaactccaaTTTTTTTT- |
| | | GCGCACGACCACTATCGTGTAGG |
| GATA4 | 292 | -GGGATGAGGACCAC-GTTTTAGAGCTA- |
| | | CCTACACGATAGTGGTCGTGCGC- |
| | | TTTTTTTTcagccaactccaaTTTTTTTT- |
| | | GCGCACGACCACTATCGTGTAGG |
| GATA4 | 293 | -GATTGGGTTCGCTG-GTTTTAGAGCTA- |
| | | CCTTCCCGACTTCCGTAGGAGCGC- |
| | | TTTTTTTTcagccaactccaaTTTTTTTT- |
| | | GCGCTCCTACGGAAGTCGGGAAGG |
| GATA4 | 294 | g-CCTCCGCTGGGCGC-GTTTTAGAGCTA- |
| | | CCTTCCCGACTTCCGTAGGAGCGC- |
| | | TTTTTTTTcagccaactccaaTTTTTTTT- |
| | | GCGCTCCTACGGAAGTCGGGAAGG |
| GATA4 | 295 | -GCAACTCGGCCCTA-GTTTTAGAGCTA- |
| | | CCTTCCCGACTTCCGTAGGAGCGC- |
| | | TTTTTTTTcagccaactccaaTTTTTTTT- |
| | | GCGCTCCTACGGAAGTCGGGAAGG |
| GATA4 | 296 | -GGGATGAGGACCAC-GTTTTAGAGCTA- |
| | | CCTTCCCGACTTCCGTAGGAGCGC- |
| | | TTTTTTTTcagccaactccaaTTTTTTTT- |
| | | GCGCTCCTACGGAAGTCGGGAAGG |
| GATA4 | 297 | -GATTGGGTTCGCTG-GTTTTAGAGCTA- |
| | | CCTGAAGGTAAAGATCGGGTCCTC- |
| | | TTTTTTTTcagccaactccaaTTTTTTTT- |
| | | GAGGACCCGATCTTTACCTTCAGG |
| GATA4 | 298 | g-CCTCCGCTGGGCGC-GTTTTAGAGCTA- |
| | | CCTGAAGGTAAAGATCGGGTCCTC- |
| | | TTTTTTTTcagccaactccaaTTTTTTTT- |
| | | GAGGACCCGATCTTTACCTTCAGG |
| GATA4 | 299 | -GCAACTCGGCCCTA-GTTTTAGAGCTA- |
| | | CCTGAAGGTAAAGATCGGGTCCTC- |
| | | TTTTTTTTcagccaactccaaTTTTTTTT- |
| | | GAGGACCCGATCTTTACCTTCAGG |
| GATA4 | 300 | -GGGATGAGGACCAC-GTTTTAGAGCTA- |
| | | CCTGAAGGTAAAGATCGGGTCCTC- |
| | | TTTTTTTTcagccaactccaaTTTTTTTT- |
| | | GAGGACCCGATCTTTACCTTCAGG |
| GATA4 | 301 | -GATTGGGTTCGCTG-GTTTTAGAGCTA- |
| | | CCTGGTTATAGCGGACGCACTGT- |
| | | TTTTTTTTcagccaactccaaTTTTTTTT- |
| | | ACAGTGCGTCCGCTATAACCAGG |
| GATA4 | 302 | g-CCTCCGCTGGGCGC-GTTTTAGAGCTA- |
| | | CCTGGTTATAGCGGACGCACTGT- |
| | | TTTTTTTTcagccaactccaaTTTTTTTT- |
| | | ACAGTGCGTCCGCTATAACCAGG |
| GATA4 | 303 | -GCAACTCGGCCCTA-GTTTTAGAGCTA- |
| | | CCTGGTTATAGCGGACGCACTGT- |
| | | TTTTTTTTcagccaactccaaTTTTTTTT- |
| | | ACAGTGCGTCCGCTATAACCAGG |
| GATA4 | 304 | -GGGATGAGGACCAC-GTTTTAGAGCTA- |
| | | CCTGGTTATAGCGGACGCACTGT- |
| | | TTTTTTTTcagccaactccaaTTTTTTTT- |
| | | ACAGTGCGTCCGCTATAACCAGG |
| GATA4 | 305 | -GATTGGGTTCGCTG-GTTTTAGAGCTA- |
| | | CCGCATCGTATTATCTGCGAAGC- |
| | | TTTTTTTTcagccaactccaaTTTTTTTT- |
| | | GCTTCGCAGATAATACGATGCGG |
| GATA4 | 306 | g-CCTCCGCTGGGCGC-GTTTTAGAGCTA- |
| | | CCGCATCGTATTATCTGCGAAGC- |
| | | TTTTTTTTcagccaactccaaTTTTTTTT- |
| | | GCTTCGCAGATAATACGATGCGG |
| GATA4 | 307 | -GCAACTCGGCCCTA-GTTTTAGAGCTA- |
| | | CCGCATCGTATTATCTGCGAAGC- |
| | | TTTTTTTTcagccaactccaaTTTTTTTT- |
| | | GCTTCGCAGATAATACGATGCGG |
| GATA4 | 308 | -GGGATGAGGACCAC-GTTTTAGAGCTA- |
| | | CCGCATCGTATTATCTGCGAAGC- |
| | | TTTTTTTTcagccaactccaaTTTTTTTT- |
| | | GCTTCGCAGATAATACGATGCGG |
| GATA4 | 309 | -GATTGGGTTCGCTG-GTTTTAGAGCTA- |
| | | CCGCTAGGACGTTCAACGGAGTC- |
| | | TTTTTTTTcagccaactccaaTTTTTTTT- |
| | | GACTCCGTTGAACGTCCTAGCGG |
| GATA4 | 310 | g-CCTCCGCTGGGCGC-GTTTTAGAGCTA- |
| | | CCGCTAGGACGTTCAACGGAGTC- |
| | | TTTTTTTTcagccaactccaaTTTTTTTT- |
| | | GACTCCGTTGAACGTCCTAGCGG |
| GATA4 | 311 | -GCAACTCGGCCCTA-GTTTTAGAGCTA- |
| | | CCGCTAGGACGTTCAACGGAGTC- |
| | | TTTTTTTTcagccaactccaaTTTTTTTT- |
| | | GACTCCGTTGAACGTCCTAGCGG |
| GATA4 | 312 | -GGGATGAGGACCAC-GTTTTAGAGCTA- |
| | | CCGCTAGGACGTTCAACGGAGTC- |
| | | TTTTTTTTcagccaactccaaTTTTTTTT- |
| | | GACTCCGTTGAACGTCCTAGCGG |
| GATA4 | 313 | -GATTGGGTTCGCTG-GTTTTAGAGCTA- |
| | | CCATAGCGGTACTATCGGCATCT- |
| | | TTTTTTTTcagccaactccaaTTTTTTTT- |
| | | AGATGCCGATAGTACCGCTATGG |
| GATA4 | 314 | g-CCTCCGCTGGGCGC-GTTTTAGAGCTA- |
| | | CCATAGCGGTACTATCGGCATCT- |
| | | TTTTTTTTcagccaactccaaTTTTTTTT- |
| | | AGATGCCGATAGTACCGCTATGG |
| GATA4 | 315 | -GCAACTCGGCCCTA-GTTTTAGAGCTA- |
| | | CCATAGCGGTACTATCGGCATCT- |
| | | TTTTTTTTcagccaactccaaTTTTTTTT- |
| | | AGATGCCGATAGTACCGCTATGG |
| GATA4 | 316 | -GGGATGAGGACCAC-GTTTTAGAGCTA- |
| | | CCATAGCGGTACTATCGGCATCT- |
| | | TTTTTTTTcagccaactccaaTTTTTTTT- |
| | | AGATGCCGATAGTACCGCTATGG |
| GATA4 | 317 | -GATTGGGTTCGCTG-GTTTTAGAGCTA- |
| | | CCTCGTACTAGTCTCGCATGACC- |
| | | TTTTTTTTcagccaactccaaTTTTTTTT- |
| | | GGTCATGCGAGACTAGTACGAGG |
| GATA4 | 318 | g-CCTCCGCTGGGCGC-GTTTTAGAGCTA- |
| | | CCTCGTACTAGTCTCGCATGACC- |
| | | TTTTTTTTcagccaactccaaTTTTTTTT- |
| | | GGTCATGCGAGACTAGTACGAGG |
| GATA4 | 319 | -GCAACTCGGCCCTA-GTTTTAGAGCTA- |
| | | CCTCGTACTAGTCTCGCATGACC- |
| | | TTTTTTTTcagccaactccaaTTTTTTTT- |
| | | GGTCATGCGAGACTAGTACGAGG |
| GATA4 | 320 | -GGGATGAGGACCAC-GTTTTAGAGCTA- |
| | | CCTCGTACTAGTCTCGCATGACC- |
| | | TTTTTTTTcagccaactccaaTTTTTTTT- |
| | | GGTCATGCGAGACTAGTACGAGG |
| GATA4 | 321 | -GATTGGGTTCGCTG-GTTTTAGAGCTA- |
| | | CCGATAGTGCTAAACGACGCTTT- |
| | | TTTTTTTTcagccaactccaaTTTTTTTT- |
| | | AAAGCGTCGTTTAGCACTATCGG |
| GATA4 | 322 | g-CCTCCGCTGGGCGC-GTTTTAGAGCTA- |
| | | CCGATAGTGCTAAACGACGCTTT- |
| | | TTTTTTTTcagccaactccaaTTTTTTTT- |
| | | AAAGCGTCGTTTAGCACTATCGG |
| GATA4 | 323 | -GCAACTCGGCCCTA-GTTTTAGAGCTA- |
| | | CCGATAGTGCTAAACGACGCTTT- |
| | | TTTTTTTTcagccaactccaaTTTTTTTT- |
| | | AAAGCGTCGTTTAGCACTATCGG |
| GATA4 | 324 | -GGGATGAGGACCAC-GTTTTAGAGCTA- |
| | | CCGATAGTGCTAAACGACGCTTT- |
| | | TTTTTTTTcagccaactccaaTTTTTTTT- |
| | | AAAGCGTCGTTTAGCACTATCGG |
| GATA4 | 325 | -GATTGGGTTCGCTG-GTTTTAGAGCTA- |
| | | CCCGTTATCGACGTTCAAGGAAC- |
| | | TTTTTTTTcagccaactccaaTTTTTTTT- |
| | | GTTCCTTGAACGTCGATAACGGG |
| GATA4 | 326 | g-CCTCCGCTGGGCGC-GTTTTAGAGCTA- |
| | | CCCGTTATCGACGTTCAAGGAAC- |
| | | TTTTTTTTcagccaactccaaTTTTTTTT- |
| | | GTTCCTTGAACGTCGATAACGGG |
| GATA4 | 327 | -GCAACTCGGCCCTA-GTTTTAGAGCTA- |
| | | CCCGTTATCGACGTTCAAGGAAC- |
| | | TTTTTTTTcagccaactccaaTTTTTTTT- |
| | | GTTCCTTGAACGTCGATAACGGG |
| GATA4 | 328 | -GGGATGAGGACCAC-GTTTTAGAGCTA- |
| | | CCCGTTATCGACGTTCAAGGAAC- |
| | | TTTTTTTTcagccaactccaaTTTTTTTT- |
| | | GTTCCTTGAACGTCGATAACGGG |
| GATA4 | 329 | -GATTGGGTTCGCTG-GTTTTAGAGCTA- |
| | | CCGATCAATGCGGTCTGCGTAAC- |
| | | TTTTTTTTcagccaactccaaTTTTTTTT- |
| | | GTTACGCAGACCGCATTGATCGG |
| GATA4 | 330 | g-CCTCCGCTGGGCGC-GTTTTAGAGCTA- |
| | | CCGATCAATGCGGTCTGCGTAAC- |
| | | TTTTTTTTcagccaactccaaTTTTTTTT- |
| | | GTTACGCAGACCGCATTGATCGG |
| GATA4 | 331 | -GCAACTCGGCCCTA-GTTTTAGAGCTA- |
| | | CCGATCAATGCGGTCTGCGTAAC- |
| | | TTTTTTTTcagccaactccaaTTTTTTTT- |
| | | GTTACGCAGACCGCATTGATCGG |
| GATA4 | 332 | -GGGATGAGGACCAC-GTTTTAGAGCTA- |
| | | CCGATCAATGCGGTCTGCGTAAC- |
| | | TTTTTTTTcagccaactccaaTTTTTTTT- |
| | | GTTACGCAGACCGCATTGATCGG |
| GATA4 | 333 | -GATTGGGTTCGCTG-GTTTTAGAGCTA- |
| | | CCCTTACTCGCGATACTCTCGAC- |
| | | TTTTTTTTcagccaactccaaTTTTTTTT- |
| | | GTCGAGAGTATCGCGAGTAAGGG |
| GATA4 | 334 | g-CCTCCGCTGGGCGC-GTTTTAGAGCTA- |
| | | CCCTTACTCGCGATACTCTCGAC- |
| | | TTTTTTTTcagccaactccaaTTTTTTTT- |
| | | GTCGAGAGTATCGCGAGTAAGGG |
| GATA4 | 335 | -GCAACTCGGCCCTA-GTTTTAGAGCTA- |
| | | CCCTTACTCGCGATACTCTCGAC- |
| | | TTTTTTTTcagccaactccaaTTTTTTTT- |
| | | GTCGAGAGTATCGCGAGTAAGGG |
| GATA4 | 336 | -GGGATGAGGACCAC-GTTTTAGAGCTA- |
| | | CCCTTACTCGCGATACTCTCGAC- |
| | | TTTTTTTTcagccaactccaaTTTTTTTT- |
| | | GTCGAGAGTATCGCGAGTAAGGG |
| GATA4 | 337 | -GATTGGGTTCGCTG-GTTTTAGAGCTA- |
| | | CCGCGGACGGTAAGCACGGAATA- |
| | | TTTTTTTTcagccaactccaaTTTTTTTT- |
| | | TATTCCGTGCTTACCGTCCGCGG |
| GATA4 | 338 | g-CCTCCGCTGGGCGC-GTTTTAGAGCTA- |
| | | CCGCGGACGGTAAGCACGGAATA- |
| | | TTTTTTTTcagccaactccaaTTTTTTTT- |
| | | TATTCCGTGCTTACCGTCCGCGG |
| GATA4 | 339 | -GCAACTCGGCCCTA-GTTTTAGAGCTA- |
| | | CCGCGGACGGTAAGCACGGAATA- |
| | | TTTTTTTTcagccaactccaaTTTTTTTT- |
| | | TATTCCGTGCTTACCGTCCGCGG |
| GATA4 | 340 | -GGGATGAGGACCAC-GTTTTAGAGCTA- |
| | | CCGCGGACGGTAAGCACGGAATA- |
| | | TTTTTTTTcagccaactccaaTTTTTTTT- |
| | | TATTCCGTGCTTACCGTCCGCGG |
| GATA4 | 341 | -GATTGGGTTCGCTG-GTTTTAGAGCTA- |
| | | CCTATAGTCACGAATCGTAGGGT- |
| | | TTTTTTTTcagccaactccaaTTTTTTTT- |
| | | ACCCTACGATTCGTGACTATAGG |
| GATA4 | 342 | g-CCTCCGCTGGGCGC-GTTTTAGAGCTA- |
| | | CCTATAGTCACGAATCGTAGGGT- |
| | | TTTTTTTTcagccaactccaaTTTTTTTT- |
| | | ACCCTACGATTCGTGACTATAGG |
| GATA4 | 343 | -GCAACTCGGCCCTA-GTTTTAGAGCTA- |
| | | CCTATAGTCACGAATCGTAGGGT- |
| | | TTTTTTTTcagccaactccaaTTTTTTTT- |
| | | ACCCTACGATTCGTGACTATAGG |
| GATA4 | 344 | -GGGATGAGGACCAC-GTTTTAGAGCTA- |
| | | CCTATAGTCACGAATCGTAGGGT- |
| | | TTTTTTTTcagccaactccaaTTTTTTTT- |
| | | ACCCTACGATTCGTGACTATAGG |
| GATA4 | 345 | -GATTGGGTTCGCTG-GTTTTAGAGCTA- |
| | | CCCGTCGTCACGTATGCGTAGCA- |
| | | TTTTTTTTcagccaactccaaTTTTTTTT- |
| | | TGCTACGCATACGTGACGACGGG |
| GATA4 | 346 | g-CCTCCGCTGGGCGC-GTTTTAGAGCTA- |
| | | CCCGTCGTCACGTATGCGTAGCA- |
| | | TTTTTTTTcagccaactccaaTTTTTTTT- |
| | | TGCTACGCATACGTGACGACGGG |
| GATA4 | 347 | -GCAACTCGGCCCTA-GTTTTAGAGCTA- |
| | | CCCGTCGTCACGTATGCGTAGCA- |
| | | TTTTTTTTcagccaactccaaTTTTTTTT- |
| | | TGCTACGCATACGTGACGACGGG |
| GATA4 | 348 | -GGGATGAGGACCAC-GTTTTAGAGCTA- |
| | | CCCGTCGTCACGTATGCGTAGCA- |
| | | TTTTTTTTcagccaactccaaTTTTTTTT- |
| | | TGCTACGCATACGTGACGACGGG |
| GATA4 | 349 | -GATTGGGTTCGCTG-GTTTTAGAGCTA- |
| | | CCCGAGAGGTAGTAGACGACGCA- |
| | | TTTTTTTTcagccaactccaaTTTTTTTT- |
| | | TGCGTCGTCTACTACCTCTCGGG |
| GATA4 | 350 | g-CCTCCGCTGGGCGC-GTTTTAGAGCTA- |
| | | CCCGAGAGGTAGTAGACGACGCA- |
| | | TTTTTTTTcagccaactccaaTTTTTTTT- |
| | | TGCGTCGTCTACTACCTCTCGGG |
| GATA4 | 351 | -GCAACTCGGCCCTA-GTTTTAGAGCTA- |
| | | CCCGAGAGGTAGTAGACGACGCA- |
| | | TTTTTTTTcagccaactccaaTTTTTTTT- |
| | | TGCGTCGTCTACTACCTCTCGGG |
| GATA4 | 352 | -GGGATGAGGACCAC-GTTTTAGAGCTA- |
| | | CCCGAGAGGTAGTAGACGACGCA- |
| | | TTTTTTTTcagccaactccaaTTTTTTTT- |
| | | TGCGTCGTCTACTACCTCTCGGG |
| GATA4 | 353 | -GATTGGGTTCGCTG-GTTTTAGAGCTA- |
| | | CCGACGTCTACGGACGGGAGCTA- |
| | | TTTTTTTTcagccaactccaaTTTTTTTT- |
| | | TAGCTCCCGTCCGTAGACGTCGG |
| GATA4 | 354 | g-CCTCCGCTGGGCGC-GTTTTAGAGCTA- |
| | | CCGACGTCTACGGACGGGAGCTA- |
| | | TTTTTTTTcagccaactccaaTTTTTTTT- |
| | | TAGCTCCCGTCCGTAGACGTCGG |
| GATA4 | 355 | -GCAACTCGGCCCTA-GTTTTAGAGCTA- |
| | | CCGACGTCTACGGACGGGAGCTA- |
| | | TTTTTTTTcagccaactccaaTTTTTTTT- |
| | | TAGCTCCCGTCCGTAGACGTCGG |
| GATA4 | 356 | -GGGATGAGGACCAC-GTTTTAGAGCTA- |
| | | CCGACGTCTACGGACGGGAGCTA- |
| | | TTTTTTTTcagccaactccaaTTTTTTTT- |
| | | TAGCTCCCGTCCGTAGACGTCGG |
| GATA4 | 357 | -GATTGGGTTCGCTG-GTTTTAGAGCTA- |
| | | CCAAAGCTCATTCGCGACTGAGC- |
| | | TTTTTTTTcagccaactccaaTTTTTTTT- |
| | | GCTCAGTCGCGAATGAGCTTTGG |
| GATA4 | 358 | g-CCTCCGCTGGGCGC-GTTTTAGAGCTA- |
| | | CCAAAGCTCATTCGCGACTGAGC- |
| | | TTTTTTTTcagccaactccaaTTTTTTTT- |
| | | GCTCAGTCGCGAATGAGCTTTGG |
| GATA4 | 359 | -GCAACTCGGCCCTA-GTTTTAGAGCTA- |
| | | CCAAAGCTCATTCGCGACTGAGC- |
| | | TTTTTTTTcagccaactccaaTTTTTTTT- |
| | | GCTCAGTCGCGAATGAGCTTTGG |
| GATA4 | 360 | -GGGATGAGGACCAC-GTTTTAGAGCTA- |
| | | CCAAAGCTCATTCGCGACTGAGC- |
| | | TTTTTTTTcagccaactccaaTTTTTTTT- |
| | | GCTCAGTCGCGAATGAGCTTTGG |
| GATA4 | 361 | -GATTGGGTTCGCTG-GTTTTAGAGCTA- |
| | | CCATGGCACGATCGACACGGAGG- |
| | | TTTTTTTTcagccaactccaaTTTTTTTT- |
| | | CCTCCGTGTCGATCGTGCCATGG |
| GATA4 | 362 | g-CCTCCGCTGGGCGC-GTTTTAGAGCTA- |
| | | CCATGGCACGATCGACACGGAGG- |
| | | TTTTTTTTcagccaactccaaTTTTTTTT- |
| | | CCTCCGTGTCGATCGTGCCATGG |
| GATA4 | 363 | -GCAACTCGGCCCTA-GTTTTAGAGCTA- |
| | | CCATGGCACGATCGACACGGAGG- |
| | | TTTTTTTTcagccaactccaaTTTTTTTT- |
| | | CCTCCGTGTCGATCGTGCCATGG |
| GATA4 | 364 | -GGGATGAGGACCAC-GTTTTAGAGCTA- |
| | | CCATGGCACGATCGACACGGAGG- |
| | | TTTTTTTTcagccaactccaaTTTTTTTT- |
| | | CCTCCGTGTCGATCGTGCCATGG |
| GATA4 | 365 | -GATTGGGTTCGCTG-GTTTTAGAGCTA- |
| | | CCCGAACTCTCTATCGAACGAGT- |
| | | TTTTTTTTcagccaactccaaTTTTTTTT- |
| | | ACTCGTTCGATAGAGAGTTCGGG |
| GATA4 | 366 | g-CCTCCGCTGGGCGC-GTTTTAGAGCTA- |
| | | CCCGAACTCTCTATCGAACGAGT- |
| | | TTTTTTTTcagccaactccaaTTTTTTTT- |
| | | ACTCGTTCGATAGAGAGTTCGGG |
| GATA4 | 367 | -GCAACTCGGCCCTA-GTTTTAGAGCTA- |
| | | CCCGAACTCTCTATCGAACGAGT- |
| | | TTTTTTTTcagccaactccaaTTTTTTTT- |
| | | ACTCGTTCGATAGAGAGTTCGGG |
| GATA4 | 368 | -GGGATGAGGACCAC-GTTTTAGAGCTA- |
| | | CCCGAACTCTCTATCGAACGAGT- |
| | | TTTTTTTTcagccaactccaaTTTTTTTT- |
| | | ACTCGTTCGATAGAGAGTTCGGG |
| gata6 | 369 | -GCGCTGTTTGTTTA-GTTTTAGAGCTA- |
| | | CCGTCGTTGTACCGTCTACTTGAC- |
| | | TTTTTTTTcagccaactccaaTTTTTTTT- |
| | | GTCAAGTAGACGGTACAACGACGG |
| gata6 | 370 | g-CCGCACCCATCCAG-GTTTTAGAGCTA- |
| | | CCGTCGTTGTACCGTCTACTTGAC- |
| | | TTTTTTTTcagccaactccaaTTTTTTTT- |
| | | GTCAAGTAGACGGTACAACGACGG |
| gata6 | 371 | -GCGAGTCCACCCGG-GTTTTAGAGCTA- |
| | | CCGTCGTTGTACCGTCTACTTGAC- |
| | | TTTTTTTTcagccaactccaaTTTTTTTT- |
| | | GTCAAGTAGACGGTACAACGACGG |
| gata6 | 372 | -GAGCAGCTGGGCGC-GTTTTAGAGCTA- |
| | | CCGTCGTTGTACCGTCTACTTGAC- |
| | | TTTTTTTTcagccaactccaaTTTTTTTT- |
| | | GTCAAGTAGACGGTACAACGACGG |
| gata6 | 373 | -GCGCTGTTTGTTTA-GTTTTAGAGCTA- |
| | | CCTACACTCGACATCGGTAGCTA- |
| | | TTTTTTTTcagccaactccaaTTTTTTTT- |
| | | TAGCTACCGATGTCGAGTGTAGG |
| gata6 | 374 | g-CCGCACCCATCCAG-GTTTTAGAGCTA- |
| | | CCTACACTCGACATCGGTAGCTA- |
| | | TTTTTTTTcagccaactccaaTTTTTTTT- |
| | | TAGCTACCGATGTCGAGTGTAGG |
| gata6 | 375 | -GCGAGTCCACCCGG-GTTTTAGAGCTA- |
| | | CCTACACTCGACATCGGTAGCTA- |
| | | TTTTTTTTcagccaactccaaTTTTTTTT- |
| | | TAGCTACCGATGTCGAGTGTAGG |
| gata6 | 376 | -GAGCAGCTGGGCGC-GTTTTAGAGCTA- |
| | | CCTACACTCGACATCGGTAGCTA- |
| | | TTTTTTTTcagccaactccaaTTTTTTTT- |
| | | TAGCTACCGATGTCGAGTGTAGG |
| gata6 | 377 | -GCGCTGTTTGTTTA-GTTTTAGAGCTA- |
| | | CCCTGGCGGAACGTTCGAGTAAT- |
| | | TTTTTTTTcagccaactccaaTTTTTTTT- |
| | | ATTACTCGAACGTTCCGCCAGGG |
| gata6 | 378 | g-CCGCACCCATCCAG-GTTTTAGAGCTA- |
| | | CCCTGGCGGAACGTTCGAGTAAT- |
| | | TTTTTTTTcagccaactccaaTTTTTTTT- |
| | | ATTACTCGAACGTTCCGCCAGGG |
| gata6 | 379 | -GCGAGTCCACCCGG-GTTTTAGAGCTA- |
| | | CCCTGGCGGAACGTTCGAGTAAT- |
| | | TTTTTTTTcagccaactccaaTTTTTTTT- |
| | | ATTACTCGAACGTTCCGCCAGGG |
| gata6 | 380 | -GAGCAGCTGGGCGC-GTTTTAGAGCTA- |
| | | CCCTGGCGGAACGTTCGAGTAAT- |
| | | TTTTTTTTcagccaactccaaTTTTTTTT- |
| | | ATTACTCGAACGTTCCGCCAGGG |
| gata6 | 381 | -GCGCTGTTTGTTTA-GTTTTAGAGCTA- |
| | | CCTACACGATAGTGGTCGTGCGC- |
| | | TTTTTTTTcagccaactccaaTTTTTTTT- |
| | | GCGCACGACCACTATCGTGTAGG |
| gata6 | 382 | g-CCGCACCCATCCAG-GTTTTAGAGCTA- |
| | | CCTACACGATAGTGGTCGTGCGC- |
| | | TTTTTTTTcagccaactccaaTTTTTTTT- |
| | | GCGCACGACCACTATCGTGTAGG |
| gata6 | 383 | -GCGAGTCCACCCGG-GTTTTAGAGCTA- |
| | | CCTACACGATAGTGGTCGTGCGC- |
| | | TTTTTTTTcagccaactccaaTTTTTTTT- |
| | | GCGCACGACCACTATCGTGTAGG |
| gata6 | 384 | -GAGCAGCTGGGCGC-GTTTTAGAGCTA- |
| | | CCTACACGATAGTGGTCGTGCGC- |
| | | TTTTTTTTcagccaactccaaTTTTTTTT- |
| | | GCGCACGACCACTATCGTGTAGG |
| gata6 | 385 | -GCGCTGTTTGTTTA-GTTTTAGAGCTA- |
| | | CCTTCCCGACTTCCGTAGGAGCGC- |
| | | TTTTTTTTcagccaactccaaTTTTTTTT- |
| | | GCGCTCCTACGGAAGTCGGGAAGG |
| gata6 | 386 | g-CCGCACCCATCCAG-GTTTTAGAGCTA- |
| | | CCTTCCCGACTTCCGTAGGAGCGC- |
| | | TTTTTTTTcagccaactccaaTTTTTTTT- |
| | | GCGCTCCTACGGAAGTCGGGAAGG |
| gata6 | 387 | -GCGAGTCCACCCGG-GTTTTAGAGCTA- |
| | | CCTTCCCGACTTCCGTAGGAGCGC- |
| | | TTTTTTTTcagccaactccaaTTTTTTTT- |
| | | GCGCTCCTACGGAAGTCGGGAAGG |
| gata6 | 388 | -GAGCAGCTGGGCGC-GTTTTAGAGCTA- |
| | | CCTTCCCGACTTCCGTAGGAGCGC- |
| | | TTTTTTTTcagccaactccaaTTTTTTTT- |
| | | GCGCTCCTACGGAAGTCGGGAAGG |
| gata6 | 389 | -GCGCTGTTTGTTTA-GTTTTAGAGCTA- |
| | | CCTGAAGGTAAAGATCGGGTCCTC- |
| | | TTTTTTTTcagccaactccaaTTTTTTTT- |
| | | GAGGACCCGATCTTTACCTTCAGG |
| gata6 | 390 | g-CCGCACCCATCCAG-GTTTTAGAGCTA- |
| | | CCTGAAGGTAAAGATCGGGTCCTC- |
| | | TTTTTTTTcagccaactccaaTTTTTTTT- |
| | | GAGGACCCGATCTTTACCTTCAGG |
| gata6 | 391 | -GCGAGTCCACCCGG-GTTTTAGAGCTA- |
| | | CCTGAAGGTAAAGATCGGGTCCTC- |
| | | TTTTTTTTcagccaactccaaTTTTTTTT- |
| | | GAGGACCCGATCTTTACCTTCAGG |
| gata6 | 392 | -GAGCAGCTGGGCGC-GTTTTAGAGCTA- |
| | | CCTGAAGGTAAAGATCGGGTCCTC- |
| | | TTTTTTTTcagccaactccaaTTTTTTTT- |
| | | GAGGACCCGATCTTTACCTTCAGG |
| gata6 | 393 | -GCGCTGTTTGTTTA-GTTTTAGAGCTA- |
| | | CCTGGTTATAGCGGACGCACTGT- |
| | | TTTTTTTTcagccaactccaaTTTTTTTT- |
| | | ACAGTGCGTCCGCTATAACCAGG |
| gata6 | 394 | g-CCGCACCCATCCAG-GTTTTAGAGCTA- |
| | | CCTGGTTATAGCGGACGCACTGT- |
| | | TTTTTTTTcagccaactccaaTTTTTTTT- |
| | | ACAGTGCGTCCGCTATAACCAGG |
| gata6 | 395 | -GCGAGTCCACCCGG-GTTTTAGAGCTA- |
| | | CCTGGTTATAGCGGACGCACTGT- |
| | | TTTTTTTTcagccaactccaaTTTTTTTT- |
| | | ACAGTGCGTCCGCTATAACCAGG |
| gata6 | 396 | -GAGCAGCTGGGCGC-GTTTTAGAGCTA- |
| | | CCTGGTTATAGCGGACGCACTGT- |
| | | TTTTTTTTcagccaactccaaTTTTTTTT- |
| | | ACAGTGCGTCCGCTATAACCAGG |
| gata6 | 397 | -GCGCTGTTTGTTTA-GTTTTAGAGCTA- |
| | | CCGCATCGTATTATCTGCGAAGC- |
| | | TTTTTTTTcagccaactccaaTTTTTTTT- |
| | | GCTTCGCAGATAATACGATGCGG |
| gata6 | 398 | g-CCGCACCCATCCAG-GTTTTAGAGCTA- |
| | | CCGCATCGTATTATCTGCGAAGC- |
| | | TTTTTTTTcagccaactccaaTTTTTTTT- |
| | | GCTTCGCAGATAATACGATGCGG |
| gata6 | 399 | -GCGAGTCCACCCGG-GTTTTAGAGCTA- |
| | | CCGCATCGTATTATCTGCGAAGC- |
| | | TTTTTTTTcagccaactccaaTTTTTTTT- |
| | | GCTTCGCAGATAATACGATGCGG |
| gata6 | 400 | -GAGCAGCTGGGCGC-GTTTTAGAGCTA- |
| | | CCGCATCGTATTATCTGCGAAGC- |
| | | TTTTTTTTcagccaactccaaTTTTTTTT- |
| | | GCTTCGCAGATAATACGATGCGG |
| gata6 | 401 | -GCGCTGTTTGTTTA-GTTTTAGAGCTA- |
| | | CCGCTAGGACGTTCAACGGAGTC- |
| | | TTTTTTTTcagccaactccaaTTTTTTTT- |
| | | GACTCCGTTGAACGTCCTAGCGG |
| gata6 | 402 | g-CCGCACCCATCCAG-GTTTTAGAGCTA- |
| | | CCGCTAGGACGTTCAACGGAGTC- |
| | | TTTTTTTTcagccaactccaaTTTTTTTT- |
| | | GACTCCGTTGAACGTCCTAGCGG |
| gata6 | 403 | -GCGAGTCCACCCGG-GTTTTAGAGCTA- |
| | | CCGCTAGGACGTTCAACGGAGTC- |
| | | TTTTTTTTcagccaactccaaTTTTTTTT- |
| | | GACTCCGTTGAACGTCCTAGCGG |
| gata6 | 404 | -GAGCAGCTGGGCGC-GTTTTAGAGCTA- |
| | | CCGCTAGGACGTTCAACGGAGTC- |
| | | TTTTTTTTcagccaactccaaTTTTTTTT- |
| | | GACTCCGTTGAACGTCCTAGCGG |
| gata6 | 405 | -GCGCTGTTTGTTTA-GTTTTAGAGCTA- |
| | | CCATAGCGGTACTATCGGCATCT- |
| | | TTTTTTTTcagccaactccaaTTTTTTTT- |
| | | AGATGCCGATAGTACCGCTATGG |
| gata6 | 406 | g-CCGCACCCATCCAG-GTTTTAGAGCTA- |
| | | CCATAGCGGTACTATCGGCATCT- |
| | | TTTTTTTTcagccaactccaaTTTTTTTT- |
| | | AGATGCCGATAGTACCGCTATGG |
| gata6 | 407 | -GCGAGTCCACCCGG-GTTTTAGAGCTA- |
| | | CCATAGCGGTACTATCGGCATCT- |
| | | TTTTTTTTcagccaactccaaTTTTTTTT- |
| | | AGATGCCGATAGTACCGCTATGG |
| gata6 | 408 | -GAGCAGCTGGGCGC-GTTTTAGAGCTA- |
| | | CCATAGCGGTACTATCGGCATCT- |
| | | TTTTTTTTcagccaactccaaTTTTTTTT- |
| | | AGATGCCGATAGTACCGCTATGG |
| gata6 | 409 | -GCGCTGTTTGTTTA-GTTTTAGAGCTA- |
| | | CCTCGTACTAGTCTCGCATGACC- |
| | | TTTTTTTTcagccaactccaaTTTTTTTT- |
| | | GGTCATGCGAGACTAGTACGAGG |
| gata6 | 410 | g-CCGCACCCATCCAG-GTTTTAGAGCTA- |
| | | CCTCGTACTAGTCTCGCATGACC- |
| | | TTTTTTTTcagccaactccaaTTTTTTTT- |
| | | GGTCATGCGAGACTAGTACGAGG |
| gata6 | 411 | -GCGAGTCCACCCGG-GTTTTAGAGCTA- |
| | | CCTCGTACTAGTCTCGCATGACC- |
| | | TTTTTTTTcagccaactccaaTTTTTTTT- |
| | | GGTCATGCGAGACTAGTACGAGG |
| gata6 | 412 | -GAGCAGCTGGGCGC-GTTTTAGAGCTA- |
| | | CCTCGTACTAGTCTCGCATGACC- |
| | | TTTTTTTTcagccaactccaaTTTTTTTT- |
| | | GGTCATGCGAGACTAGTACGAGG |
| gata6 | 413 | -GCGCTGTTTGTTTA-GTTTTAGAGCTA- |
| | | CCGATAGTGCTAAACGACGCTTT- |
| | | TTTTTTTTcagccaactccaaTTTTTTTT- |
| | | AAAGCGTCGTTTAGCACTATCGG |
| gata6 | 414 | g-CCGCACCCATCCAG-GTTTTAGAGCTA- |
| | | CCGATAGTGCTAAACGACGCTTT- |
| | | TTTTTTTTcagccaactccaaTTTTTTTT- |
| | | AAAGCGTCGTTTAGCACTATCGG |
| gata6 | 415 | -GCGAGTCCACCCGG-GTTTTAGAGCTA- |
| | | CCGATAGTGCTAAACGACGCTTT- |
| | | TTTTTTTTcagccaactccaaTTTTTTTT- |
| | | AAAGCGTCGTTTAGCACTATCGG |
| gata6 | 416 | -GAGCAGCTGGGCGC-GTTTTAGAGCTA- |
| | | CCGATAGTGCTAAACGACGCTTT- |
| | | TTTTTTTTcagccaactccaaTTTTTTTT- |
| | | AAAGCGTCGTTTAGCACTATCGG |
| gata6 | 417 | -GCGCTGTTTGTTTA-GTTTTAGAGCTA- |
| | | CCCGTTATCGACGTTCAAGGAAC- |
| | | TTTTTTTTcagccaactccaaTTTTTTTT- |
| | | GTTCCTTGAACGTCGATAACGGG |
| gata6 | 418 | g-CCGCACCCATCCAG-GTTTTAGAGCTA- |
| | | CCCGTTATCGACGTTCAAGGAAC- |
| | | TTTTTTTTcagccaactccaaTTTTTTTT- |
| | | GTTCCTTGAACGTCGATAACGGG |
| gata6 | 419 | -GCGAGTCCACCCGG-GTTTTAGAGCTA- |
| | | CCCGTTATCGACGTTCAAGGAAC- |
| | | TTTTTTTTcagccaactccaaTTTTTTTT- |
| | | GTTCCTTGAACGTCGATAACGGG |
| gata6 | 420 | -GAGCAGCTGGGCGC-GTTTTAGAGCTA- |
| | | CCCGTTATCGACGTTCAAGGAAC- |
| | | TTTTTTTTcagccaactccaaTTTTTTTT- |
| | | GTTCCTTGAACGTCGATAACGGG |
| gata6 | 421 | -GCGCTGTTTGTTTA-GTTTTAGAGCTA- |
| | | CCGATCAATGCGGTCTGCGTAAC- |
| | | TTTTTTTTcagccaactccaaTTTTTTTT- |
| | | GTTACGCAGACCGCATTGATCGG |
| gata6 | 422 | g-CCGCACCCATCCAG-GTTTTAGAGCTA- |
| | | CCGATCAATGCGGTCTGCGTAAC- |
| | | TTTTTTTTcagccaactccaaTTTTTTTT- |
| | | GTTACGCAGACCGCATTGATCGG |
| gata6 | 423 | -GCGAGTCCACCCGG-GTTTTAGAGCTA- |
| | | CCGATCAATGCGGTCTGCGTAAC- |
| | | TTTTTTTTcagccaactccaaTTTTTTTT- |
| | | GTTACGCAGACCGCATTGATCGG |
| gata6 | 424 | -GAGCAGCTGGGCGC-GTTTTAGAGCTA- |
| | | CCGATCAATGCGGTCTGCGTAAC- |
| | | TTTTTTTTcagccaactccaaTTTTTTTT- |
| | | GTTACGCAGACCGCATTGATCGG |
| gata6 | 425 | -GCGCTGTTTGTTTA-GTTTTAGAGCTA- |
| | | CCCTTACTCGCGATACTCTCGAC- |
| | | TTTTTTTTcagccaactccaaTTTTTTTT- |
| | | GTCGAGAGTATCGCGAGTAAGGG |
| gata6 | 426 | g-CCGCACCCATCCAG-GTTTTAGAGCTA- |
| | | CCCTTACTCGCGATACTCTCGAC- |
| | | TTTTTTTTcagccaactccaaTTTTTTTT- |
| | | GTCGAGAGTATCGCGAGTAAGGG |
| gata6 | 427 | -GCGAGTCCACCCGG-GTTTTAGAGCTA- |
| | | CCCTTACTCGCGATACTCTCGAC- |
| | | TTTTTTTTcagccaactccaaTTTTTTTT- |
| | | GTCGAGAGTATCGCGAGTAAGGG |
| gata6 | 428 | -GAGCAGCTGGGCGC-GTTTTAGAGCTA- |
| | | CCCTTACTCGCGATACTCTCGAC- |
| | | TTTTTTTTcagccaactccaaTTTTTTTT- |
| | | GTCGAGAGTATCGCGAGTAAGGG |
| gata6 | 429 | -GCGCTGTTTGTTTA-GTTTTAGAGCTA- |
| | | CCGCGGACGGTAAGCACGGAATA- |
| | | TTTTTTTTcagccaactccaaTTTTTTTT- |
| | | TATTCCGTGCTTACCGTCCGCGG |
| gata6 | 430 | g-CCGCACCCATCCAG-GTTTTAGAGCTA- |
| | | CCGCGGACGGTAAGCACGGAATA- |
| | | TTTTTTTTcagccaactccaaTTTTTTTT- |
| | | TATTCCGTGCTTACCGTCCGCGG |
| gata6 | 431 | -GCGAGTCCACCCGG-GTTTTAGAGCTA- |
| | | CCGCGGACGGTAAGCACGGAATA- |
| | | TTTTTTTTcagccaactccaaTTTTTTTT- |
| | | TATTCCGTGCTTACCGTCCGCGG |
| gata6 | 432 | -GAGCAGCTGGGCGC-GTTTTAGAGCTA- |
| | | CCGCGGACGGTAAGCACGGAATA- |
| | | TTTTTTTTcagccaactccaaTTTTTTTT- |
| | | TATTCCGTGCTTACCGTCCGCGG |
| gata6 | 433 | -GCGCTGTTTGTTTA-GTTTTAGAGCTA- |
| | | CCTATAGTCACGAATCGTAGGGT- |
| | | TTTTTTTTcagccaactccaaTTTTTTTT- |
| | | ACCCTACGATTCGTGACTATAGG |
| gata6 | 434 | g-CCGCACCCATCCAG-GTTTTAGAGCTA- |
| | | CCTATAGTCACGAATCGTAGGGT- |
| | | TTTTTTTTcagccaactccaaTTTTTTTT- |
| | | ACCCTACGATTCGTGACTATAGG |
| gata6 | 435 | -GCGAGTCCACCCGG-GTTTTAGAGCTA- |
| | | CCTATAGTCACGAATCGTAGGGT- |
| | | TTTTTTTTcagccaactccaaTTTTTTTT- |
| | | ACCCTACGATTCGTGACTATAGG |
| gata6 | 436 | -GAGCAGCTGGGCGC-GTTTTAGAGCTA- |
| | | CCTATAGTCACGAATCGTAGGGT- |
| | | TTTTTTTTcagccaactccaaTTTTTTTT- |
| | | ACCCTACGATTCGTGACTATAGG |
| gata6 | 437 | -GCGCTGTTTGTTTA-GTTTTAGAGCTA- |
| | | CCCGTCGTCACGTATGCGTAGCA- |
| | | TTTTTTTTcagccaactccaaTTTTTTTT- |
| | | TGCTACGCATACGTGACGACGGG |
| gata6 | 438 | g-CCGCACCCATCCAG-GTTTTAGAGCTA- |
| | | CCCGTCGTCACGTATGCGTAGCA- |
| | | TTTTTTTTcagccaactccaaTTTTTTTT- |
| | | TGCTACGCATACGTGACGACGGG |
| gata6 | 439 | -GCGAGTCCACCCGG-GTTTTAGAGCTA- |
| | | CCCGTCGTCACGTATGCGTAGCA- |
| | | TTTTTTTTcagccaactccaaTTTTTTTT- |
| | | TGCTACGCATACGTGACGACGGG |
| gata6 | 440 | -GAGCAGCTGGGCGC-GTTTTAGAGCTA- |
| | | CCCGTCGTCACGTATGCGTAGCA- |
| | | TTTTTTTTcagccaactccaaTTTTTTTT- |
| | | TGCTACGCATACGTGACGACGGG |
| gata6 | 441 | -GCGCTGTTTGTTTA-GTTTTAGAGCTA- |
| | | CCCGAGAGGTAGTAGACGACGCA- |
| | | TTTTTTTTcagccaactccaaTTTTTTTT- |
| | | TGCGTCGTCTACTACCTCTCGGG |
| gata6 | 442 | g-CCGCACCCATCCAG-GTTTTAGAGCTA- |
| | | CCCGAGAGGTAGTAGACGACGCA- |
| | | TTTTTTTTcagccaactccaaTTTTTTTT- |
| | | TGCGTCGTCTACTACCTCTCGGG |
| gata6 | 443 | -GCGAGTCCACCCGG-GTTTTAGAGCTA- |
| | | CCCGAGAGGTAGTAGACGACGCA- |
| | | TTTTTTTTcagccaactccaaTTTTTTTT- |
| | | TGCGTCGTCTACTACCTCTCGGG |
| gata6 | 444 | -GAGCAGCTGGGCGC-GTTTTAGAGCTA- |
| | | CCCGAGAGGTAGTAGACGACGCA- |
| | | TTTTTTTTcagccaactccaaTTTTTTTT- |
| | | TGCGTCGTCTACTACCTCTCGGG |
| gata6 | 445 | -GCGCTGTTTGTTTA-GTTTTAGAGCTA- |
| | | CCGACGTCTACGGACGGGAGCTA- |
| | | TTTTTTTTcagccaactccaaTTTTTTTT- |
| | | TAGCTCCCGTCCGTAGACGTCGG |
| gata6 | 446 | g-CCGCACCCATCCAG-GTTTTAGAGCTA- |
| | | CCGACGTCTACGGACGGGAGCTA- |
| | | TTTTTTTTcagccaactccaaTTTTTTTT- |
| | | TAGCTCCCGTCCGTAGACGTCGG |
| gata6 | 447 | -GCGAGTCCACCCGG-GTTTTAGAGCTA- |
| | | CCGACGTCTACGGACGGGAGCTA- |
| | | TTTTTTTTcagccaactccaaTTTTTTTT- |
| | | TAGCTCCCGTCCGTAGACGTCGG |
| gata6 | 448 | -GAGCAGCTGGGCGC-GTTTTAGAGCTA- |
| | | CCGACGTCTACGGACGGGAGCTA- |
| | | TTTTTTTTcagccaactccaaTTTTTTTT- |
| | | TAGCTCCCGTCCGTAGACGTCGG |
| gata6 | 449 | -GCGCTGTTTGTTTA-GTTTTAGAGCTA- |
| | | CCAAAGCTCATTCGCGACTGAGC- |
| | | TTTTTTTTcagccaactccaaTTTTTTTT- |
| | | GCTCAGTCGCGAATGAGCTTTGG |
| gata6 | 450 | g-CCGCACCCATCCAG-GTTTTAGAGCTA- |
| | | CCAAAGCTCATTCGCGACTGAGC- |
| | | TTTTTTTTcagccaactccaaTTTTTTTT- |
| | | GCTCAGTCGCGAATGAGCTTTGG |
| gata6 | 451 | -GCGAGTCCACCCGG-GTTTTAGAGCTA- |
| | | CCAAAGCTCATTCGCGACTGAGC- |
| | | TTTTTTTTcagccaactccaaTTTTTTTT- |
| | | GCTCAGTCGCGAATGAGCTTTGG |
| gata6 | 452 | -GAGCAGCTGGGCGC-GTTTTAGAGCTA- |
| | | CCAAAGCTCATTCGCGACTGAGC- |
| | | TTTTTTTTcagccaactccaaTTTTTTTT- |
| | | GCTCAGTCGCGAATGAGCTTTGG |
| gata6 | 453 | -GCGCTGTTTGTTTA-GTTTTAGAGCTA- |
| | | CCATGGCACGATCGACACGGAGG- |
| | | TTTTTTTTcagccaactccaaTTTTTTTT- |
| | | CCTCCGTGTCGATCGTGCCATGG |
| gata6 | 454 | g-CCGCACCCATCCAG-GTTTTAGAGCTA- |
| | | CCATGGCACGATCGACACGGAGG- |
| | | TTTTTTTTcagccaactccaaTTTTTTTT- |
| | | CCTCCGTGTCGATCGTGCCATGG |
| gata6 | 455 | -GCGAGTCCACCCGG-GTTTTAGAGCTA- |
| | | CCATGGCACGATCGACACGGAGG- |
| | | TTTTTTTTcagccaactccaaTTTTTTTT- |
| | | CCTCCGTGTCGATCGTGCCATGG |
| gata6 | 456 | -GAGCAGCTGGGCGC-GTTTTAGAGCTA- |
| | | CCATGGCACGATCGACACGGAGG- |
| | | TTTTTTTTcagccaactccaaTTTTTTTT- |
| | | CCTCCGTGTCGATCGTGCCATGG |
| gata6 | 457 | -GCGCTGTTTGTTTA-GTTTTAGAGCTA- |
| | | CCCGAACTCTCTATCGAACGAGT- |
| | | TTTTTTTTcagccaactccaaTTTTTTTT- |
| | | ACTCGTTCGATAGAGAGTTCGGG |
| gata6 | 458 | g-CCGCACCCATCCAG-GTTTTAGAGCTA- |
| | | CCCGAACTCTCTATCGAACGAGT- |
| | | TTTTTTTTcagccaactccaaTTTTTTTT- |
| | | ACTCGTTCGATAGAGAGTTCGGG |
| gata6 | 459 | -GCGAGTCCACCCGG-GTTTTAGAGCTA- |
| | | CCCGAACTCTCTATCGAACGAGT- |
| | | TTTTTTTTcagccaactccaaTTTTTTTT- |
| | | ACTCGTTCGATAGAGAGTTCGGG |
| gata6 | 460 | -GAGCAGCTGGGCGC-GTTTTAGAGCTA- |
| | | CCCGAACTCTCTATCGAACGAGT- |
| | | TTTTTTTTcagccaactccaaTTTTTTTT- |
| | | ACTCGTTCGATAGAGAGTTCGGG |
| GCG | 461 | g-AGACCTTAGAGACC-GTTTTAGAGCTA- |
| | | CCGTCGTTGTACCGTCTACTTGAC- |
| | | TTTTTTTTcagccaactccaaTTTTTTTT- |
| | | GTCAAGTAGACGGTACAACGACGG |
| GCG | 462 | -GCTACGTAATTTCA-GTTTTAGAGCTA- |
| | | CCGTCGTTGTACCGTCTACTTGAC- |
| | | TTTTTTTTcagccaactccaaTTTTTTTT- |
| | | GTCAAGTAGACGGTACAACGACGG |
| GCG | 463 | g-TTGAAAGTAGAAGG-GTTTTAGAGCTA- |
| | | CCGTCGTTGTACCGTCTACTTGAC- |
| | | TTTTTTTTcagccaactccaaTTTTTTTT- |
| | | GTCAAGTAGACGGTACAACGACGG |
| GCG | 464 | g-TTCTTACAAGTCTT-GTTTTAGAGCTA- |
| | | CCGTCGTTGTACCGTCTACTTGAC- |
| | | TTTTTTTTcagccaactccaaTTTTTTTT- |
| | | GTCAAGTAGACGGTACAACGACGG |
| GCG | 465 | g-AGACCTTAGAGACC-GTTTTAGAGCTA- |
| | | CCTACACTCGACATCGGTAGCTA- |
| | | TTTTTTTTcagccaactccaaTTTTTTTT- |
| | | TAGCTACCGATGTCGAGTGTAGG |
| GCG | 466 | -GCTACGTAATTTCA-GTTTTAGAGCTA- |
| | | CCTACACTCGACATCGGTAGCTA- |
| | | TTTTTTTTcagccaactccaaTTTTTTTT- |
| | | TAGCTACCGATGTCGAGTGTAGG |
| GCG | 467 | g-TTGAAAGTAGAAGG-GTTTTAGAGCTA- |
| | | CCTACACTCGACATCGGTAGCTA- |
| | | TTTTTTTTcagccaactccaaTTTTTTTT- |
| | | TAGCTACCGATGTCGAGTGTAGG |
| GCG | 468 | g-TTCTTACAAGTCTT-GTTTTAGAGCTA- |
| | | CCTACACTCGACATCGGTAGCTA- |
| | | TTTTTTTTcagccaactccaaTTTTTTTT- |
| | | TAGCTACCGATGTCGAGTGTAGG |
| GCG | 469 | g-AGACCTTAGAGACC-GTTTTAGAGCTA- |
| | | CCCTGGCGGAACGTTCGAGTAAT- |
| | | TTTTTTTTcagccaactccaaTTTTTTTT- |
| | | ATTACTCGAACGTTCCGCCAGGG |
| GCG | 470 | -GCTACGTAATTTCA-GTTTTAGAGCTA- |
| | | CCCTGGCGGAACGTTCGAGTAAT- |
| | | TTTTTTTTcagccaactccaaTTTTTTTT- |
| | | ATTACTCGAACGTTCCGCCAGGG |
| GCG | 471 | g-TTGAAAGTAGAAGG-GTTTTAGAGCTA- |
| | | CCCTGGCGGAACGTTCGAGTAAT- |
| | | TTTTTTTTcagccaactccaaTTTTTTTT- |
| | | ATTACTCGAACGTTCCGCCAGGG |
| GCG | 472 | g-TTCTTACAAGTCTT-GTTTTAGAGCTA- |
| | | CCCTGGCGGAACGTTCGAGTAAT- |
| | | TTTTTTTTcagccaactccaaTTTTTTTT- |
| | | ATTACTCGAACGTTCCGCCAGGG |
| GCG | 473 | g-AGACCTTAGAGACC-GTTTTAGAGCTA- |
| | | CCTACACGATAGTGGTCGTGCGC- |
| | | TTTTTTTTcagccaactccaaTTTTTTTT- |
| | | GCGCACGACCACTATCGTGTAGG |
| GCG | 474 | -GCTACGTAATTTCA-GTTTTAGAGCTA- |
| | | CCTACACGATAGTGGTCGTGCGC- |
| | | TTTTTTTTcagccaactccaaTTTTTTTT- |
| | | GCGCACGACCACTATCGTGTAGG |
| GCG | 475 | g-TTGAAAGTAGAAGG-GTTTTAGAGCTA- |
| | | CCTACACGATAGTGGTCGTGCGC- |
| | | TTTTTTTTcagccaactccaaTTTTTTTT- |
| | | GCGCACGACCACTATCGTGTAGG |
| GCG | 476 | g-TTCTTACAAGTCTT-GTTTTAGAGCTA- |
| | | CCTACACGATAGTGGTCGTGCGC- |
| | | TTTTTTTTcagccaactccaaTTTTTTTT- |
| | | GCGCACGACCACTATCGTGTAGG |
| GCG | 477 | g-AGACCTTAGAGACC-GTTTTAGAGCTA- |
| | | CCTTCCCGACTTCCGTAGGAGCGC- |
| | | TTTTTTTTcagccaactccaaTTTTTTTT- |
| | | GCGCTCCTACGGAAGTCGGGAAGG |
| GCG | 478 | -GCTACGTAATTTCA-GTTTTAGAGCTA- |
| | | CCTTCCCGACTTCCGTAGGAGCGC- |
| | | TTTTTTTTcagccaactccaaTTTTTTTT- |
| | | GCGCTCCTACGGAAGTCGGGAAGG |
| GCG | 479 | g-TTGAAAGTAGAAGG-GTTTTAGAGCTA- |
| | | CCTTCCCGACTTCCGTAGGAGCGC- |
| | | TTTTTTTTcagccaactccaaTTTTTTTT- |
| | | GCGCTCCTACGGAAGTCGGGAAGG |
| GCG | 480 | g-TTCTTACAAGTCTT-GTTTTAGAGCTA- |
| | | CCTTCCCGACTTCCGTAGGAGCGC- |
| | | TTTTTTTTcagccaactccaaTTTTTTTT- |
| | | GCGCTCCTACGGAAGTCGGGAAGG |
| GCG | 481 | g-AGACCTTAGAGACC-GTTTTAGAGCTA- |
| | | CCTGAAGGTAAAGATCGGGTCCTC- |
| | | TTTTTTTTcagccaactccaaTTTTTTTT- |
| | | GAGGACCCGATCTTTACCTTCAGG |
| GCG | 482 | -GCTACGTAATTTCA-GTTTTAGAGCTA- |
| | | CCTGAAGGTAAAGATCGGGTCCTC- |
| | | TTTTTTTTcagccaactccaaTTTTTTTT- |
| | | GAGGACCCGATCTTTACCTTCAGG |
| GCG | 483 | g-TTGAAAGTAGAAGG-GTTTTAGAGCTA- |
| | | CCTGAAGGTAAAGATCGGGTCCTC- |
| | | TTTTTTTTcagccaactccaaTTTTTTTT- |
| | | GAGGACCCGATCTTTACCTTCAGG |
| GCG | 484 | g-TTCTTACAAGTCTT-GTTTTAGAGCTA- |
| | | CCTGAAGGTAAAGATCGGGTCCTC- |
| | | TTTTTTTTcagccaactccaaTTTTTTTT- |
| | | GAGGACCCGATCTTTACCTTCAGG |
| GCG | 485 | g-AGACCTTAGAGACC-GTTTTAGAGCTA- |
| | | CCTGGTTATAGCGGACGCACTGT- |
| | | TTTTTTTTcagccaactccaaTTTTTTTT- |
| | | ACAGTGCGTCCGCTATAACCAGG |
| GCG | 486 | -GCTACGTAATTTCA-GTTTTAGAGCTA- |
| | | CCTGGTTATAGCGGACGCACTGT- |
| | | TTTTTTTTcagccaactccaaTTTTTTTT- |
| | | ACAGTGCGTCCGCTATAACCAGG |
| GCG | 487 | g-TTGAAAGTAGAAGG-GTTTTAGAGCTA- |
| | | CCTGGTTATAGCGGACGCACTGT- |
| | | TTTTTTTTcagccaactccaaTTTTTTTT- |
| | | ACAGTGCGTCCGCTATAACCAGG |
| GCG | 488 | g-TTCTTACAAGTCTT-GTTTTAGAGCTA- |
| | | CCTGGTTATAGCGGACGCACTGT- |
| | | TTTTTTTTcagccaactccaaTTTTTTTT- |
| | | ACAGTGCGTCCGCTATAACCAGG |
| GCG | 489 | g-AGACCTTAGAGACC-GTTTTAGAGCTA- |
| | | CCGCATCGTATTATCTGCGAAGC- |
| | | TTTTTTTTcagccaactccaaTTTTTTTT- |
| | | GCTTCGCAGATAATACGATGCGG |
| GCG | 490 | -GCTACGTAATTTCA-GTTTTAGAGCTA- |
| | | CCGCATCGTATTATCTGCGAAGC- |
| | | TTTTTTTTcagccaactccaaTTTTTTTT- |
| | | GCTTCGCAGATAATACGATGCGG |
| GCG | 491 | g-TTGAAAGTAGAAGG-GTTTTAGAGCTA- |
| | | CCGCATCGTATTATCTGCGAAGC- |
| | | TTTTTTTTcagccaactccaaTTTTTTTT- |
| | | GCTTCGCAGATAATACGATGCGG |
| GCG | 492 | g-TTCTTACAAGTCTT-GTTTTAGAGCTA- |
| | | CCGCATCGTATTATCTGCGAAGC- |
| | | TTTTTTTTcagccaactccaaTTTTTTTT- |
| | | GCTTCGCAGATAATACGATGCGG |
| GCG | 493 | g-AGACCTTAGAGACC-GTTTTAGAGCTA- |
| | | CCGCTAGGACGTTCAACGGAGTC- |
| | | TTTTTTTTcagccaactccaaTTTTTTTT- |
| | | GACTCCGTTGAACGTCCTAGCGG |
| GCG | 494 | -GCTACGTAATTTCA-GTTTTAGAGCTA- |
| | | CCGCTAGGACGTTCAACGGAGTC- |
| | | TTTTTTTTcagccaactccaaTTTTTTTT- |
| | | GACTCCGTTGAACGTCCTAGCGG |
| GCG | 495 | g-TTGAAAGTAGAAGG-GTTTTAGAGCTA- |
| | | CCGCTAGGACGTTCAACGGAGTC- |
| | | TTTTTTTTcagccaactccaaTTTTTTTT- |
| | | GACTCCGTTGAACGTCCTAGCGG |
| GCG | 496 | g-TTCTTACAAGTCTT-GTTTTAGAGCTA- |
| | | CCGCTAGGACGTTCAACGGAGTC- |
| | | TTTTTTTTcagccaactccaaTTTTTTTT- |
| | | GACTCCGTTGAACGTCCTAGCGG |
| GCG | 497 | g-AGACCTTAGAGACC-GTTTTAGAGCTA- |
| | | CCATAGCGGTACTATCGGCATCT- |
| | | TTTTTTTTcagccaactccaaTTTTTTTT- |
| | | AGATGCCGATAGTACCGCTATGG |
| GCG | 498 | -GCTACGTAATTTCA-GTTTTAGAGCTA- |
| | | CCATAGCGGTACTATCGGCATCT- |
| | | TTTTTTTTcagccaactccaaTTTTTTTT- |
| | | AGATGCCGATAGTACCGCTATGG |
| GCG | 499 | g-TTGAAAGTAGAAGG-GTTTTAGAGCTA- |
| | | CCATAGCGGTACTATCGGCATCT- |
| | | TTTTTTTTcagccaactccaaTTTTTTTT- |
| | | AGATGCCGATAGTACCGCTATGG |
| GCG | 500 | g-TTCTTACAAGTCTT-GTTTTAGAGCTA- |
| | | CCATAGCGGTACTATCGGCATCT- |
| | | TTTTTTTTcagccaactccaaTTTTTTTT- |
| | | AGATGCCGATAGTACCGCTATGG |
| GCG | 501 | g-AGACCTTAGAGACC-GTTTTAGAGCTA- |
| | | CCTCGTACTAGTCTCGCATGACC- |
| | | TTTTTTTTcagccaactccaaTTTTTTTT- |
| | | GGTCATGCGAGACTAGTACGAGG |
| GCG | 502 | -GCTACGTAATTTCA-GTTTTAGAGCTA- |
| | | CCTCGTACTAGTCTCGCATGACC- |
| | | TTTTTTTTcagccaactccaaTTTTTTTT- |
| | | GGTCATGCGAGACTAGTACGAGG |
| GCG | 503 | g-TTGAAAGTAGAAGG-GTTTTAGAGCTA- |
| | | CCTCGTACTAGTCTCGCATGACC- |
| | | TTTTTTTTcagccaactccaaTTTTTTTT- |
| | | GGTCATGCGAGACTAGTACGAGG |
| GCG | 504 | g-TTCTTACAAGTCTT-GTTTTAGAGCTA- |
| | | CCTCGTACTAGTCTCGCATGACC- |
| | | TTTTTTTTcagccaactccaaTTTTTTTT- |
| | | GGTCATGCGAGACTAGTACGAGG |
| GCG | 505 | g-AGACCTTAGAGACC-GTTTTAGAGCTA- |
| | | CCGATAGTGCTAAACGACGCTTT- |
| | | TTTTTTTTcagccaactccaaTTTTTTTT- |
| | | AAAGCGTCGTTTAGCACTATCGG |
| GCG | 506 | -GCTACGTAATTTCA-GTTTTAGAGCTA- |
| | | CCGATAGTGCTAAACGACGCTTT- |
| | | TTTTTTTTcagccaactccaaTTTTTTTT- |
| | | AAAGCGTCGTTTAGCACTATCGG |
| GCG | 507 | g-TTGAAAGTAGAAGG-GTTTTAGAGCTA- |
| | | CCGATAGTGCTAAACGACGCTTT- |
| | | TTTTTTTTcagccaactccaaTTTTTTTT- |
| | | AAAGCGTCGTTTAGCACTATCGG |
| GCG | 508 | g-TTCTTACAAGTCTT-GTTTTAGAGCTA- |
| | | CCGATAGTGCTAAACGACGCTTT- |
| | | TTTTTTTTcagccaactccaaTTTTTTTT- |
| | | AAAGCGTCGTTTAGCACTATCGG |
| GCG | 509 | g-AGACCTTAGAGACC-GTTTTAGAGCTA- |
| | | CCCGTTATCGACGTTCAAGGAAC- |
| | | TTTTTTTTcagccaactccaaTTTTTTTT- |
| | | GTTCCTTGAACGTCGATAACGGG |
| GCG | 510 | -GCTACGTAATTTCA-GTTTTAGAGCTA- |
| | | CCCGTTATCGACGTTCAAGGAAC- |
| | | TTTTTTTTcagccaactccaaTTTTTTTT- |
| | | GTTCCTTGAACGTCGATAACGGG |
| GCG | 511 | g-TTGAAAGTAGAAGG-GTTTTAGAGCTA- |
| | | CCCGTTATCGACGTTCAAGGAAC- |
| | | TTTTTTTTcagccaactccaaTTTTTTTT- |
| | | GTTCCTTGAACGTCGATAACGGG |
| GCG | 512 | g-TTCTTACAAGTCTT-GTTTTAGAGCTA- |
| | | CCCGTTATCGACGTTCAAGGAAC- |
| | | TTTTTTTTcagccaactccaaTTTTTTTT- |
| | | GTTCCTTGAACGTCGATAACGGG |
| GCG | 513 | g-AGACCTTAGAGACC-GTTTTAGAGCTA- |
| | | CCGATCAATGCGGTCTGCGTAAC- |
| | | TTTTTTTTcagccaactccaaTTTTTTTT- |
| | | GTTACGCAGACCGCATTGATCGG |
| GCG | 514 | -GCTACGTAATTTCA-GTTTTAGAGCTA- |
| | | CCGATCAATGCGGTCTGCGTAAC- |
| | | TTTTTTTTcagccaactccaaTTTTTTTT- |
| | | GTTACGCAGACCGCATTGATCGG |
| GCG | 515 | g-TTGAAAGTAGAAGG-GTTTTAGAGCTA- |
| | | CCGATCAATGCGGTCTGCGTAAC- |
| | | TTTTTTTTcagccaactccaaTTTTTTTT- |
| | | GTTACGCAGACCGCATTGATCGG |
| GCG | 516 | g-TTCTTACAAGTCTT-GTTTTAGAGCTA- |
| | | CCGATCAATGCGGTCTGCGTAAC- |
| | | TTTTTTTTcagccaactccaaTTTTTTTT- |
| | | GTTACGCAGACCGCATTGATCGG |
| GCG | 517 | g-AGACCTTAGAGACC-GTTTTAGAGCTA- |
| | | CCCTTACTCGCGATACTCTCGAC- |
| | | TTTTTTTTcagccaactccaaTTTTTTTT- |
| | | GTCGAGAGTATCGCGAGTAAGGG |
| GCG | 518 | -GCTACGTAATTTCA-GTTTTAGAGCTA- |
| | | CCCTTACTCGCGATACTCTCGAC- |
| | | TTTTTTTTcagccaactccaaTTTTTTTT- |
| | | GTCGAGAGTATCGCGAGTAAGGG |
| GCG | 519 | g-TTGAAAGTAGAAGG-GTTTTAGAGCTA- |
| | | CCCTTACTCGCGATACTCTCGAC- |
| | | TTTTTTTTcagccaactccaaTTTTTTTT- |
| | | GTCGAGAGTATCGCGAGTAAGGG |
| GCG | 520 | g-TTCTTACAAGTCTT-GTTTTAGAGCTA- |
| | | CCCTTACTCGCGATACTCTCGAC- |
| | | TTTTTTTTcagccaactccaaTTTTTTTT- |
| | | GTCGAGAGTATCGCGAGTAAGGG |
| GCG | 521 | g-AGACCTTAGAGACC-GTTTTAGAGCTA- |
| | | CCGCGGACGGTAAGCACGGAATA- |
| | | TTTTTTTTcagccaactccaaTTTTTTTT- |
| | | TATTCCGTGCTTACCGTCCGCGG |
| GCG | 522 | -GCTACGTAATTTCA-GTTTTAGAGCTA- |
| | | CCGCGGACGGTAAGCACGGAATA- |
| | | TTTTTTTTcagccaactccaaTTTTTTTT- |
| | | TATTCCGTGCTTACCGTCCGCGG |
| GCG | 523 | g-TTGAAAGTAGAAGG-GTTTTAGAGCTA- |
| | | CCGCGGACGGTAAGCACGGAATA- |
| | | TTTTTTTTcagccaactccaaTTTTTTTT- |
| | | TATTCCGTGCTTACCGTCCGCGG |
| GCG | 524 | g-TTCTTACAAGTCTT-GTTTTAGAGCTA- |
| | | CCGCGGACGGTAAGCACGGAATA- |
| | | TTTTTTTTcagccaactccaaTTTTTTTT- |
| | | TATTCCGTGCTTACCGTCCGCGG |
| GCG | 525 | g-AGACCTTAGAGACC-GTTTTAGAGCTA- |
| | | CCTATAGTCACGAATCGTAGGGT- |
| | | TTTTTTTTcagccaactccaaTTTTTTTT- |
| | | ACCCTACGATTCGTGACTATAGG |
| GCG | 526 | -GCTACGTAATTTCA-GTTTTAGAGCTA- |
| | | CCTATAGTCACGAATCGTAGGGT- |
| | | TTTTTTTTcagccaactccaaTTTTTTTT- |
| | | ACCCTACGATTCGTGACTATAGG |
| GCG | 527 | g-TTGAAAGTAGAAGG-GTTTTAGAGCTA- |
| | | CCTATAGTCACGAATCGTAGGGT- |
| | | TTTTTTTTcagccaactccaaTTTTTTTT- |
| | | ACCCTACGATTCGTGACTATAGG |
| GCG | 528 | g-TTCTTACAAGTCTT-GTTTTAGAGCTA- |
| | | CCTATAGTCACGAATCGTAGGGT- |
| | | TTTTTTTTcagccaactccaaTTTTTTTT- |
| | | ACCCTACGATTCGTGACTATAGG |
| GCG | 529 | g-AGACCTTAGAGACC-GTTTTAGAGCTA- |
| | | CCCGTCGTCACGTATGCGTAGCA- |
| | | TTTTTTTTcagccaactccaaTTTTTTTT- |
| | | TGCTACGCATACGTGACGACGGG |
| GCG | 530 | -GCTACGTAATTTCA-GTTTTAGAGCTA- |
| | | CCCGTCGTCACGTATGCGTAGCA- |
| | | TTTTTTTTcagccaactccaaTTTTTTTT- |
| | | TGCTACGCATACGTGACGACGGG |
| GCG | 531 | g-TTGAAAGTAGAAGG-GTTTTAGAGCTA- |
| | | CCCGTCGTCACGTATGCGTAGCA- |
| | | TTTTTTTTcagccaactccaaTTTTTTTT- |
| | | TGCTACGCATACGTGACGACGGG |
| GCG | 532 | g-TTCTTACAAGTCTT-GTTTTAGAGCTA- |
| | | CCCGTCGTCACGTATGCGTAGCA- |
| | | TTTTTTTTcagccaactccaaTTTTTTTT- |
| | | TGCTACGCATACGTGACGACGGG |
| GCG | 533 | g-AGACCTTAGAGACC-GTTTTAGAGCTA- |
| | | CCCGAGAGGTAGTAGACGACGCA- |
| | | TTTTTTTTcagccaactccaaTTTTTTTT- |
| | | TGCGTCGTCTACTACCTCTCGGG |
| GCG | 534 | -GCTACGTAATTTCA-GTTTTAGAGCTA- |
| | | CCCGAGAGGTAGTAGACGACGCA- |
| | | TTTTTTTTcagccaactccaaTTTTTTTT- |
| | | TGCGTCGTCTACTACCTCTCGGG |
| GCG | 535 | g-TTGAAAGTAGAAGG-GTTTTAGAGCTA- |
| | | CCCGAGAGGTAGTAGACGACGCA- |
| | | TTTTTTTTcagccaactccaaTTTTTTTT- |
| | | TGCGTCGTCTACTACCTCTCGGG |
| GCG | 536 | g-TTCTTACAAGTCTT-GTTTTAGAGCTA- |
| | | CCCGAGAGGTAGTAGACGACGCA- |
| | | TTTTTTTTcagccaactccaaTTTTTTTT- |
| | | TGCGTCGTCTACTACCTCTCGGG |
| GCG | 537 | g-AGACCTTAGAGACC-GTTTTAGAGCTA- |
| | | CCGACGTCTACGGACGGGAGCTA- |
| | | TTTTTTTTcagccaactccaaTTTTTTTT- |
| | | TAGCTCCCGTCCGTAGACGTCGG |
| GCG | 538 | -GCTACGTAATTTCA-GTTTTAGAGCTA- |
| | | CCGACGTCTACGGACGGGAGCTA- |
| | | TTTTTTTTcagccaactccaaTTTTTTTT- |
| | | TAGCTCCCGTCCGTAGACGTCGG |
| GCG | 539 | g-TTGAAAGTAGAAGG-GTTTTAGAGCTA- |
| | | CCGACGTCTACGGACGGGAGCTA- |
| | | TTTTTTTTcagccaactccaaTTTTTTTT- |
| | | TAGCTCCCGTCCGTAGACGTCGG |
| GCG | 540 | g-TTCTTACAAGTCTT-GTTTTAGAGCTA- |
| | | CCGACGTCTACGGACGGGAGCTA- |
| | | TTTTTTTTcagccaactccaaTTTTTTTT- |
| | | TAGCTCCCGTCCGTAGACGTCGG |
| GCG | 541 | g-AGACCTTAGAGACC-GTTTTAGAGCTA- |
| | | CCAAAGCTCATTCGCGACTGAGC- |
| | | TTTTTTTTcagccaactccaaTTTTTTTT- |
| | | GCTCAGTCGCGAATGAGCTTTGG |
| GCG | 542 | -GCTACGTAATTTCA-GTTTTAGAGCTA- |
| | | CCAAAGCTCATTCGCGACTGAGC- |
| | | TTTTTTTTcagccaactccaaTTTTTTTT- |
| | | GCTCAGTCGCGAATGAGCTTTGG |
| GCG | 543 | g-TTGAAAGTAGAAGG-GTTTTAGAGCTA- |
| | | CCAAAGCTCATTCGCGACTGAGC- |
| | | TTTTTTTTcagccaactccaaTTTTTTTT- |
| | | GCTCAGTCGCGAATGAGCTTTGG |
| GCG | 544 | g-TTCTTACAAGTCTT-GTTTTAGAGCTA- |
| | | CCAAAGCTCATTCGCGACTGAGC- |
| | | TTTTTTTTcagccaactccaaTTTTTTTT- |
| | | GCTCAGTCGCGAATGAGCTTTGG |
| GCG | 545 | g-AGACCTTAGAGACC-GTTTTAGAGCTA- |
| | | CCATGGCACGATCGACACGGAGG- |
| | | TTTTTTTTcagccaactccaaTTTTTTTT- |
| | | CCTCCGTGTCGATCGTGCCATGG |
| GCG | 546 | -GCTACGTAATTTCA-GTTTTAGAGCTA- |
| | | CCATGGCACGATCGACACGGAGG- |
| | | TTTTTTTTcagccaactccaaTTTTTTTT- |
| | | CCTCCGTGTCGATCGTGCCATGG |
| GCG | 547 | g-TTGAAAGTAGAAGG-GTTTTAGAGCTA- |
| | | CCATGGCACGATCGACACGGAGG- |
| | | TTTTTTTTcagccaactccaaTTTTTTTT- |
| | | CCTCCGTGTCGATCGTGCCATGG |
| GCG | 548 | g-TTCTTACAAGTCTT-GTTTTAGAGCTA- |
| | | CCATGGCACGATCGACACGGAGG- |
| | | TTTTTTTTcagccaactccaaTTTTTTTT- |
| | | CCTCCGTGTCGATCGTGCCATGG |
| GCG | 549 | g-AGACCTTAGAGACC-GTTTTAGAGCTA- |
| | | CCCGAACTCTCTATCGAACGAGT- |
| | | TTTTTTTTcagccaactccaaTTTTTTTT- |
| | | ACTCGTTCGATAGAGAGTTCGGG |
| GCG | 550 | -GCTACGTAATTTCA-GTTTTAGAGCTA- |
| | | CCCGAACTCTCTATCGAACGAGT- |
| | | TTTTTTTTcagccaactccaaTTTTTTTT- |
| | | ACTCGTTCGATAGAGAGTTCGGG |
| GCG | 551 | g-TTGAAAGTAGAAGG-GTTTTAGAGCTA- |
| | | CCCGAACTCTCTATCGAACGAGT- |
| | | TTTTTTTTcagccaactccaaTTTTTTTT- |
| | | ACTCGTTCGATAGAGAGTTCGGG |
| GCG | 552 | g-TTCTTACAAGTCTT-GTTTTAGAGCTA- |
| | | CCCGAACTCTCTATCGAACGAGT- |
| | | TTTTTTTTcagccaactccaaTTTTTTTT- |
| | | ACTCGTTCGATAGAGAGTTCGGG |
| INS | 553 | g-ATGGGCCAGGCGGC-GTTTTAGAGCTA- |
| | | CCGTCGTTGTACCGTCTACTTGAC- |
| | | TTTTTTTTcagccaactccaaTTTTTTTT- |
| | | GTCAAGTAGACGGTACAACGACGG |
| INS | 554 | g-ACCCGCTGGTCCTG-GTTTTAGAGCTA- |
| | | CCGTCGTTGTACCGTCTACTTGAC- |
| | | TTTTTTTTcagccaactccaaTTTTTTTT- |
| | | GTCAAGTAGACGGTACAACGACGG |
| INS | 555 | g-TCGTGAAGCATGTG-GTTTTAGAGCTA- |
| | | CCGTCGTTGTACCGTCTACTTGAC- |
| | | TTTTTTTTcagccaactccaaTTTTTTTT- |
| | | GTCAAGTAGACGGTACAACGACGG |
| INS | 556 | g-CAGCACCAGGGAAA-GTTTTAGAGCTA- |
| | | CCGTCGTTGTACCGTCTACTTGAC- |
| | | TTTTTTTTcagccaactccaaTTTTTTTT- |
| | | GTCAAGTAGACGGTACAACGACGG |
| INS | 557 | g-ATGGGCCAGGCGGC-GTTTTAGAGCTA- |
| | | CCTACACTCGACATCGGTAGCTA- |
| | | TTTTTTTTcagccaactccaaTTTTTTTT- |
| | | TAGCTACCGATGTCGAGTGTAGG |
| INS | 558 | g-ACCCGCTGGTCCTG-GTTTTAGAGCTA- |
| | | CCTACACTCGACATCGGTAGCTA- |
| | | TTTTTTTTcagccaactccaaTTTTTTTT- |
| | | TAGCTACCGATGTCGAGTGTAGG |
| INS | 559 | g-TCGTGAAGCATGTG-GTTTTAGAGCTA- |
| | | CCTACACTCGACATCGGTAGCTA- |
| | | TTTTTTTTcagccaactccaaTTTTTTTT- |
| | | TAGCTACCGATGTCGAGTGTAGG |
| INS | 560 | g-CAGCACCAGGGAAA-GTTTTAGAGCTA- |
| | | CCTACACTCGACATCGGTAGCTA- |
| | | TTTTTTTTcagccaactccaaTTTTTTTT- |
| | | TAGCTACCGATGTCGAGTGTAGG |
| INS | 561 | g-ATGGGCCAGGCGGC-GTTTTAGAGCTA- |
| | | CCCTGGCGGAACGTTCGAGTAAT- |
| | | TTTTTTTTcagccaactccaaTTTTTTTT- |
| | | ATTACTCGAACGTTCCGCCAGGG |
| INS | 562 | g-ACCCGCTGGTCCTG-GTTTTAGAGCTA- |
| | | CCCTGGCGGAACGTTCGAGTAAT- |
| | | TTTTTTTTcagccaactccaaTTTTTTTT- |
| | | ATTACTCGAACGTTCCGCCAGGG |
| INS | 563 | g-TCGTGAAGCATGTG-GTTTTAGAGCTA- |
| | | CCCTGGCGGAACGTTCGAGTAAT- |
| | | TTTTTTTTcagccaactccaaTTTTTTTT- |
| | | ATTACTCGAACGTTCCGCCAGGG |
| INS | 564 | g-CAGCACCAGGGAAA-GTTTTAGAGCTA- |
| | | CCCTGGCGGAACGTTCGAGTAAT- |
| | | TTTTTTTTcagccaactccaaTTTTTTTT- |
| | | ATTACTCGAACGTTCCGCCAGGG |
| INS | 565 | g-ATGGGCCAGGCGGC-GTTTTAGAGCTA- |
| | | CCTACACGATAGTGGTCGTGCGC- |
| | | TTTTTTTTcagccaactccaaTTTTTTTT- |
| | | GCGCACGACCACTATCGTGTAGG |
| INS | 566 | g-ACCCGCTGGTCCTG-GTTTTAGAGCTA- |
| | | CCTACACGATAGTGGTCGTGCGC- |
| | | TTTTTTTTcagccaactccaaTTTTTTTT- |
| | | GCGCACGACCACTATCGTGTAGG |
| INS | 567 | g-TCGTGAAGCATGTG-GTTTTAGAGCTA- |
| | | CCTACACGATAGTGGTCGTGCGC- |
| | | TTTTTTTTcagccaactccaaTTTTTTTT- |
| | | GCGCACGACCACTATCGTGTAGG |
| INS | 568 | g-CAGCACCAGGGAAA-GTTTTAGAGCTA- |
| | | CCTACACGATAGTGGTCGTGCGC- |
| | | TTTTTTTTcagccaactccaaTTTTTTTT- |
| | | GCGCACGACCACTATCGTGTAGG |
| INS | 569 | g-ATGGGCCAGGCGGC-GTTTTAGAGCTA- |
| | | CCTTCCCGACTTCCGTAGGAGCGC- |
| | | TTTTTTTTcagccaactccaaTTTTTTTT- |
| | | GCGCTCCTACGGAAGTCGGGAAGG |
| INS | 570 | g-ACCCGCTGGTCCTG-GTTTTAGAGCTA- |
| | | CCTTCCCGACTTCCGTAGGAGCGC- |
| | | TTTTTTTTcagccaactccaaTTTTTTTT- |
| | | GCGCTCCTACGGAAGTCGGGAAGG |
| INS | 571 | g-TCGTGAAGCATGTG-GTTTTAGAGCTA- |
| | | CCTTCCCGACTTCCGTAGGAGCGC- |
| | | TTTTTTTTcagccaactccaaTTTTTTTT- |
| | | GCGCTCCTACGGAAGTCGGGAAGG |
| INS | 572 | g-CAGCACCAGGGAAA-GTTTTAGAGCTA- |
| | | CCTTCCCGACTTCCGTAGGAGCGC- |
| | | TTTTTTTTcagccaactccaaTTTTTTTT- |
| | | GCGCTCCTACGGAAGTCGGGAAGG |
| INS | 573 | g-ATGGGCCAGGCGGC-GTTTTAGAGCTA- |
| | | CCTGAAGGTAAAGATCGGGTCCTC- |
| | | TTTTTTTTcagccaactccaaTTTTTTTT- |
| | | GAGGACCCGATCTTTACCTTCAGG |
| INS | 574 | g-ACCCGCTGGTCCTG-GTTTTAGAGCTA- |
| | | CCTGAAGGTAAAGATCGGGTCCTC- |
| | | TTTTTTTTcagccaactccaaTTTTTTTT- |
| | | GAGGACCCGATCTTTACCTTCAGG |
| INS | 575 | g-TCGTGAAGCATGTG-GTTTTAGAGCTA- |
| | | CCTGAAGGTAAAGATCGGGTCCTC- |
| | | TTTTTTTTcagccaactccaaTTTTTTTT- |
| | | GAGGACCCGATCTTTACCTTCAGG |
| INS | 576 | g-CAGCACCAGGGAAA-GTTTTAGAGCTA- |
| | | CCTGAAGGTAAAGATCGGGTCCTC- |
| | | TTTTTTTTcagccaactccaaTTTTTTTT- |
| | | GAGGACCCGATCTTTACCTTCAGG |
| INS | 577 | g-ATGGGCCAGGCGGC-GTTTTAGAGCTA- |
| | | CCTGGTTATAGCGGACGCACTGT- |
| | | TTTTTTTTcagccaactccaaTTTTTTTT- |
| | | ACAGTGCGTCCGCTATAACCAGG |
| INS | 578 | g-ACCCGCTGGTCCTG-GTTTTAGAGCTA- |
| | | CCTGGTTATAGCGGACGCACTGT- |
| | | TTTTTTTTcagccaactccaaTTTTTTTT- |
| | | ACAGTGCGTCCGCTATAACCAGG |
| INS | 579 | g-TCGTGAAGCATGTG-GTTTTAGAGCTA- |
| | | CCTGGTTATAGCGGACGCACTGT- |
| | | TTTTTTTTcagccaactccaaTTTTTTTT- |
| | | ACAGTGCGTCCGCTATAACCAGG |
| INS | 580 | g-CAGCACCAGGGAAA-GTTTTAGAGCTA- |
| | | CCTGGTTATAGCGGACGCACTGT- |
| | | TTTTTTTTcagccaactccaaTTTTTTTT- |
| | | ACAGTGCGTCCGCTATAACCAGG |
| INS | 581 | g-ATGGGCCAGGCGGC-GTTTTAGAGCTA- |
| | | CCGCATCGTATTATCTGCGAAGC- |
| | | TTTTTTTTcagccaactccaaTTTTTTTT- |
| | | GCTTCGCAGATAATACGATGCGG |
| INS | 582 | g-ACCCGCTGGTCCTG-GTTTTAGAGCTA- |
| | | CCGCATCGTATTATCTGCGAAGC- |
| | | TTTTTTTTcagccaactccaaTTTTTTTT- |
| | | GCTTCGCAGATAATACGATGCGG |
| INS | 583 | g-TCGTGAAGCATGTG-GTTTTAGAGCTA- |
| | | CCGCATCGTATTATCTGCGAAGC- |
| | | TTTTTTTTcagccaactccaaTTTTTTTT- |
| | | GCTTCGCAGATAATACGATGCGG |
| INS | 584 | g-CAGCACCAGGGAAA-GTTTTAGAGCTA- |
| | | CCGCATCGTATTATCTGCGAAGC- |
| | | TTTTTTTTcagccaactccaaTTTTTTTT- |
| | | GCTTCGCAGATAATACGATGCGG |
| INS | 585 | g-ATGGGCCAGGCGGC-GTTTTAGAGCTA- |
| | | CCGCTAGGACGTTCAACGGAGTC- |
| | | TTTTTTTTcagccaactccaaTTTTTTTT- |
| | | GACTCCGTTGAACGTCCTAGCGG |
| INS | 586 | g-ACCCGCTGGTCCTG-GTTTTAGAGCTA- |
| | | CCGCTAGGACGTTCAACGGAGTC- |
| | | TTTTTTTTcagccaactccaaTTTTTTTT- |
| | | GACTCCGTTGAACGTCCTAGCGG |
| INS | 587 | g-TCGTGAAGCATGTG-GTTTTAGAGCTA- |
| | | CCGCTAGGACGTTCAACGGAGTC- |
| | | TTTTTTTTcagccaactccaaTTTTTTTT- |
| | | GACTCCGTTGAACGTCCTAGCGG |
| INS | 588 | g-CAGCACCAGGGAAA-GTTTTAGAGCTA- |
| | | CCGCTAGGACGTTCAACGGAGTC- |
| | | TTTTTTTTcagccaactccaaTTTTTTTT- |
| | | GACTCCGTTGAACGTCCTAGCGG |
| INS | 589 | g-ATGGGCCAGGCGGC-GTTTTAGAGCTA- |
| | | CCATAGCGGTACTATCGGCATCT- |
| | | TTTTTTTTcagccaactccaaTTTTTTTT- |
| | | AGATGCCGATAGTACCGCTATGG |
| INS | 590 | g-ACCCGCTGGTCCTG-GTTTTAGAGCTA- |
| | | CCATAGCGGTACTATCGGCATCT- |
| | | TTTTTTTTcagccaactccaaTTTTTTTT- |
| | | AGATGCCGATAGTACCGCTATGG |
| INS | 591 | g-TCGTGAAGCATGTG-GTTTTAGAGCTA- |
| | | CCATAGCGGTACTATCGGCATCT- |
| | | TTTTTTTTcagccaactccaaTTTTTTTT- |
| | | AGATGCCGATAGTACCGCTATGG |
| INS | 592 | g-CAGCACCAGGGAAA-GTTTTAGAGCTA- |
| | | CCATAGCGGTACTATCGGCATCT- |
| | | TTTTTTTTcagccaactccaaTTTTTTTT- |
| | | AGATGCCGATAGTACCGCTATGG |
| INS | 593 | g-ATGGGCCAGGCGGC-GTTTTAGAGCTA- |
| | | CCTCGTACTAGTCTCGCATGACC- |
| | | TTTTTTTTcagccaactccaaTTTTTTTT- |
| | | GGTCATGCGAGACTAGTACGAGG |
| INS | 594 | g-ACCCGCTGGTCCTG-GTTTTAGAGCTA- |
| | | CCTCGTACTAGTCTCGCATGACC- |
| | | TTTTTTTTcagccaactccaaTTTTTTTT- |
| | | GGTCATGCGAGACTAGTACGAGG |
| INS | 595 | g-TCGTGAAGCATGTG-GTTTTAGAGCTA- |
| | | CCTCGTACTAGTCTCGCATGACC- |
| | | TTTTTTTTcagccaactccaaTTTTTTTT- |
| | | GGTCATGCGAGACTAGTACGAGG |
| INS | 596 | g-CAGCACCAGGGAAA-GTTTTAGAGCTA- |
| | | CCTCGTACTAGTCTCGCATGACC- |
| | | TTTTTTTTcagccaactccaaTTTTTTTT- |
| | | GGTCATGCGAGACTAGTACGAGG |
| INS | 597 | g-ATGGGCCAGGCGGC-GTTTTAGAGCTA- |
| | | CCGATAGTGCTAAACGACGCTTT- |
| | | TTTTTTTTcagccaactccaaTTTTTTTT- |
| | | AAAGCGTCGTTTAGCACTATCGG |
| INS | 598 | g-ACCCGCTGGTCCTG-GTTTTAGAGCTA- |
| | | CCGATAGTGCTAAACGACGCTTT- |
| | | TTTTTTTTcagccaactccaaTTTTTTTT- |
| | | AAAGCGTCGTTTAGCACTATCGG |
| INS | 599 | g-TCGTGAAGCATGTG-GTTTTAGAGCTA- |
| | | CCGATAGTGCTAAACGACGCTTT- |
| | | TTTTTTTTcagccaactccaaTTTTTTTT- |
| | | AAAGCGTCGTTTAGCACTATCGG |
| INS | 600 | g-CAGCACCAGGGAAA-GTTTTAGAGCTA- |
| | | CCGATAGTGCTAAACGACGCTTT- |
| | | TTTTTTTTcagccaactccaaTTTTTTTT- |
| | | AAAGCGTCGTTTAGCACTATCGG |
| INS | 601 | g-ATGGGCCAGGCGGC-GTTTTAGAGCTA- |
| | | CCCGTTATCGACGTTCAAGGAAC- |
| | | TTTTTTTTcagccaactccaaTTTTTTTT- |
| | | GTTCCTTGAACGTCGATAACGGG |
| INS | 602 | g-ACCCGCTGGTCCTG-GTTTTAGAGCTA- |
| | | CCCGTTATCGACGTTCAAGGAAC- |
| | | TTTTTTTTcagccaactccaaTTTTTTTT- |
| | | GTTCCTTGAACGTCGATAACGGG |
| INS | 603 | g-TCGTGAAGCATGTG-GTTTTAGAGCTA- |
| | | CCCGTTATCGACGTTCAAGGAAC- |
| | | TTTTTTTTcagccaactccaaTTTTTTTT- |
| | | GTTCCTTGAACGTCGATAACGGG |
| INS | 604 | g-CAGCACCAGGGAAA-GTTTTAGAGCTA- |
| | | CCCGTTATCGACGTTCAAGGAAC- |
| | | TTTTTTTTcagccaactccaaTTTTTTTT- |
| | | GTTCCTTGAACGTCGATAACGGG |
| INS | 605 | g-ATGGGCCAGGCGGC-GTTTTAGAGCTA- |
| | | CCGATCAATGCGGTCTGCGTAAC- |
| | | TTTTTTTTcagccaactccaaTTTTTTTT- |
| | | GTTACGCAGACCGCATTGATCGG |
| INS | 606 | g-ACCCGCTGGTCCTG-GTTTTAGAGCTA- |
| | | CCGATCAATGCGGTCTGCGTAAC- |
| | | TTTTTTTTcagccaactccaaTTTTTTTT- |
| | | GTTACGCAGACCGCATTGATCGG |
| INS | 607 | g-TCGTGAAGCATGTG-GTTTTAGAGCTA- |
| | | CCGATCAATGCGGTCTGCGTAAC- |
| | | TTTTTTTTcagccaactccaaTTTTTTTT- |
| | | GTTACGCAGACCGCATTGATCGG |
| INS | 608 | g-CAGCACCAGGGAAA-GTTTTAGAGCTA- |
| | | CCGATCAATGCGGTCTGCGTAAC- |
| | | TTTTTTTTcagccaactccaaTTTTTTTT- |
| | | GTTACGCAGACCGCATTGATCGG |
| INS | 609 | g-ATGGGCCAGGCGGC-GTTTTAGAGCTA- |
| | | CCCTTACTCGCGATACTCTCGAC- |
| | | TTTTTTTTcagccaactccaaTTTTTTTT- |
| | | GTCGAGAGTATCGCGAGTAAGGG |
| INS | 610 | g-ACCCGCTGGTCCTG-GTTTTAGAGCTA- |
| | | CCCTTACTCGCGATACTCTCGAC- |
| | | TTTTTTTTcagccaactccaaTTTTTTTT- |
| | | GTCGAGAGTATCGCGAGTAAGGG |
| INS | 611 | g-TCGTGAAGCATGTG-GTTTTAGAGCTA- |
| | | CCCTTACTCGCGATACTCTCGAC- |
| | | TTTTTTTTcagccaactccaaTTTTTTTT- |
| | | GTCGAGAGTATCGCGAGTAAGGG |
| INS | 612 | g-CAGCACCAGGGAAA-GTTTTAGAGCTA- |
| | | CCCTTACTCGCGATACTCTCGAC- |
| | | TTTTTTTTcagccaactccaaTTTTTTTT- |
| | | GTCGAGAGTATCGCGAGTAAGGG |
| INS | 613 | g-ATGGGCCAGGCGGC-GTTTTAGAGCTA- |
| | | CCGCGGACGGTAAGCACGGAATA- |
| | | TTTTTTTTcagccaactccaaTTTTTTTT- |
| | | TATTCCGTGCTTACCGTCCGCGG |
| INS | 614 | g-ACCCGCTGGTCCTG-GTTTTAGAGCTA- |
| | | CCGCGGACGGTAAGCACGGAATA- |
| | | TTTTTTTTcagccaactccaaTTTTTTTT- |
| | | TATTCCGTGCTTACCGTCCGCGG |
| INS | 615 | g-TCGTGAAGCATGTG-GTTTTAGAGCTA- |
| | | CCGCGGACGGTAAGCACGGAATA- |
| | | TTTTTTTTcagccaactccaaTTTTTTTT- |
| | | TATTCCGTGCTTACCGTCCGCGG |
| INS | 616 | g-CAGCACCAGGGAAA-GTTTTAGAGCTA- |
| | | CCGCGGACGGTAAGCACGGAATA- |
| | | TTTTTTTTcagccaactccaaTTTTTTTT- |
| | | TATTCCGTGCTTACCGTCCGCGG |
| INS | 617 | g-ATGGGCCAGGCGGC-GTTTTAGAGCTA- |
| | | CCTATAGTCACGAATCGTAGGGT- |
| | | TTTTTTTTcagccaactccaaTTTTTTTT- |
| | | ACCCTACGATTCGTGACTATAGG |
| INS | 618 | g-ACCCGCTGGTCCTG-GTTTTAGAGCTA- |
| | | CCTATAGTCACGAATCGTAGGGT- |
| | | TTTTTTTTcagccaactccaaTTTTTTTT- |
| | | ACCCTACGATTCGTGACTATAGG |
| INS | 619 | g-TCGTGAAGCATGTG-GTTTTAGAGCTA- |
| | | CCTATAGTCACGAATCGTAGGGT- |
| | | TTTTTTTTcagccaactccaaTTTTTTTT- |
| | | ACCCTACGATTCGTGACTATAGG |
| INS | 620 | g-CAGCACCAGGGAAA-GTTTTAGAGCTA- |
| | | CCTATAGTCACGAATCGTAGGGT- |
| | | TTTTTTTTcagccaactccaaTTTTTTTT- |
| | | ACCCTACGATTCGTGACTATAGG |
| INS | 621 | g-ATGGGCCAGGCGGC-GTTTTAGAGCTA- |
| | | CCCGTCGTCACGTATGCGTAGCA- |
| | | TTTTTTTTcagccaactccaaTTTTTTTT- |
| | | TGCTACGCATACGTGACGACGGG |
| INS | 622 | g-ACCCGCTGGTCCTG-GTTTTAGAGCTA- |
| | | CCCGTCGTCACGTATGCGTAGCA- |
| | | TTTTTTTTcagccaactccaaTTTTTTTT- |
| | | TGCTACGCATACGTGACGACGGG |
| INS | 623 | g-TCGTGAAGCATGTG-GTTTTAGAGCTA- |
| | | CCCGTCGTCACGTATGCGTAGCA- |
| | | TTTTTTTTcagccaactccaaTTTTTTTT- |
| | | TGCTACGCATACGTGACGACGGG |
| INS | 624 | g-CAGCACCAGGGAAA-GTTTTAGAGCTA- |
| | | CCCGTCGTCACGTATGCGTAGCA- |
| | | TTTTTTTTcagccaactccaaTTTTTTTT- |
| | | TGCTACGCATACGTGACGACGGG |
| INS | 625 | g-ATGGGCCAGGCGGC-GTTTTAGAGCTA- |
| | | CCCGAGAGGTAGTAGACGACGCA- |
| | | TTTTTTTTcagccaactccaaTTTTTTTT- |
| | | TGCGTCGTCTACTACCTCTCGGG |
| INS | 626 | g-ACCCGCTGGTCCTG-GTTTTAGAGCTA- |
| | | CCCGAGAGGTAGTAGACGACGCA- |
| | | TTTTTTTTcagccaactccaaTTTTTTTT- |
| | | TGCGTCGTCTACTACCTCTCGGG |
| INS | 627 | g-TCGTGAAGCATGTG-GTTTTAGAGCTA- |
| | | CCCGAGAGGTAGTAGACGACGCA- |
| | | TTTTTTTTcagccaactccaaTTTTTTTT- |
| | | TGCGTCGTCTACTACCTCTCGGG |
| INS | 628 | g-CAGCACCAGGGAAA-GTTTTAGAGCTA- |
| | | CCCGAGAGGTAGTAGACGACGCA- |
| | | TTTTTTTTcagccaactccaaTTTTTTTT- |
| | | TGCGTCGTCTACTACCTCTCGGG |
| INS | 629 | g-ATGGGCCAGGCGGC-GTTTTAGAGCTA- |
| | | CCGACGTCTACGGACGGGAGCTA- |
| | | TTTTTTTTcagccaactccaaTTTTTTTT- |
| | | TAGCTCCCGTCCGTAGACGTCGG |
| INS | 630 | g-ACCCGCTGGTCCTG-GTTTTAGAGCTA- |
| | | CCGACGTCTACGGACGGGAGCTA- |
| | | TTTTTTTTcagccaactccaaTTTTTTTT- |
| | | TAGCTCCCGTCCGTAGACGTCGG |
| INS | 631 | g-TCGTGAAGCATGTG-GTTTTAGAGCTA- |
| | | CCGACGTCTACGGACGGGAGCTA- |
| | | TTTTTTTTcagccaactccaaTTTTTTTT- |
| | | TAGCTCCCGTCCGTAGACGTCGG |
| INS | 632 | g-CAGCACCAGGGAAA-GTTTTAGAGCTA- |
| | | CCGACGTCTACGGACGGGAGCTA- |
| | | TTTTTTTTcagccaactccaaTTTTTTTT- |
| | | TAGCTCCCGTCCGTAGACGTCGG |
| INS | 633 | g-ATGGGCCAGGCGGC-GTTTTAGAGCTA- |
| | | CCAAAGCTCATTCGCGACTGAGC- |
| | | TTTTTTTTcagccaactccaaTTTTTTTT- |
| | | GCTCAGTCGCGAATGAGCTTTGG |
| INS | 634 | g-ACCCGCTGGTCCTG-GTTTTAGAGCTA- |
| | | CCAAAGCTCATTCGCGACTGAGC- |
| | | TTTTTTTTcagccaactccaaTTTTTTTT- |
| | | GCTCAGTCGCGAATGAGCTTTGG |
| INS | 635 | g-TCGTGAAGCATGTG-GTTTTAGAGCTA- |
| | | CCAAAGCTCATTCGCGACTGAGC- |
| | | TTTTTTTTcagccaactccaaTTTTTTTT- |
| | | GCTCAGTCGCGAATGAGCTTTGG |
| INS | 636 | g-CAGCACCAGGGAAA-GTTTTAGAGCTA- |
| | | CCAAAGCTCATTCGCGACTGAGC- |
| | | TTTTTTTTcagccaactccaaTTTTTTTT- |
| | | GCTCAGTCGCGAATGAGCTTTGG |
| INS | 637 | g-ATGGGCCAGGCGGC-GTTTTAGAGCTA- |
| | | CCATGGCACGATCGACACGGAGG- |
| | | TTTTTTTTcagccaactccaaTTTTTTTT- |
| | | CCTCCGTGTCGATCGTGCCATGG |
| INS | 638 | g-ACCCGCTGGTCCTG-GTTTTAGAGCTA- |
| | | CCATGGCACGATCGACACGGAGG- |
| | | TTTTTTTTcagccaactccaaTTTTTTTT- |
| | | CCTCCGTGTCGATCGTGCCATGG |
| INS | 639 | g-TCGTGAAGCATGTG-GTTTTAGAGCTA- |
| | | CCATGGCACGATCGACACGGAGG- |
| | | TTTTTTTTcagccaactccaaTTTTTTTT- |
| | | CCTCCGTGTCGATCGTGCCATGG |
| INS | 640 | g-CAGCACCAGGGAAA-GTTTTAGAGCTA- |
| | | CCATGGCACGATCGACACGGAGG- |
| | | TTTTTTTTcagccaactccaaTTTTTTTT- |
| | | CCTCCGTGTCGATCGTGCCATGG |
| INS | 641 | g-ATGGGCCAGGCGGC-GTTTTAGAGCTA- |
| | | CCCGAACTCTCTATCGAACGAGT- |
| | | TTTTTTTTcagccaactccaaTTTTTTTT- |
| | | ACTCGTTCGATAGAGAGTTCGGG |
| INS | 642 | g-ACCCGCTGGTCCTG-GTTTTAGAGCTA- |
| | | CCCGAACTCTCTATCGAACGAGT- |
| | | TTTTTTTTcagccaactccaaTTTTTTTT- |
| | | ACTCGTTCGATAGAGAGTTCGGG |
| INS | 643 | g-TCGTGAAGCATGTG-GTTTTAGAGCTA- |
| | | CCCGAACTCTCTATCGAACGAGT- |
| | | TTTTTTTTcagccaactccaaTTTTTTTT- |
| | | ACTCGTTCGATAGAGAGTTCGGG |
| INS | 644 | g-CAGCACCAGGGAAA-GTTTTAGAGCTA- |
| | | CCCGAACTCTCTATCGAACGAGT- |
| | | TTTTTTTTcagccaactccaaTTTTTTTT- |
| | | ACTCGTTCGATAGAGAGTTCGGG |
| isl1 | 645 | g-CGCCGAGCGGTCAG-GTTTTAGAGCTA- |
| | | CCGTCGTTGTACCGTCTACTTGAC- |
| | | TTTTTTTTcagccaactccaaTTTTTTTT- |
| | | GTCAAGTAGACGGTACAACGACGG |
| isl1 | 646 | -GTGCACCACGGCGT-GTTTTAGAGCTA- |
| | | CCGTCGTTGTACCGTCTACTTGAC- |
| | | TTTTTTTTcagccaactccaaTTTTTTTT- |
| | | GTCAAGTAGACGGTACAACGACGG |
| isl1 | 647 | g-CGATGGAGCTGAGT-GTTTTAGAGCTA- |
| | | CCGTCGTTGTACCGTCTACTTGAC- |
| | | TTTTTTTTcagccaactccaaTTTTTTTT- |
| | | GTCAAGTAGACGGTACAACGACGG |
| isl1 | 648 | g-AGCGCCGCGCCCAT-GTTTTAGAGCTA- |
| | | CCGTCGTTGTACCGTCTACTTGAC- |
| | | TTTTTTTTcagccaactccaaTTTTTTTT- |
| | | GTCAAGTAGACGGTACAACGACGG |
| isl1 | 649 | g-CGCCGAGCGGTCAG-GTTTTAGAGCTA- |
| | | CCTACACTCGACATCGGTAGCTA- |
| | | TTTTTTTTcagccaactccaaTTTTTTTT- |
| | | TAGCTACCGATGTCGAGTGTAGG |
| isl1 | 650 | -GTGCACCACGGCGT-GTTTTAGAGCTA- |
| | | CCTACACTCGACATCGGTAGCTA- |
| | | TTTTTTTTcagccaactccaaTTTTTTTT- |
| | | TAGCTACCGATGTCGAGTGTAGG |
| isl1 | 651 | g-CGATGGAGCTGAGT-GTTTTAGAGCTA- |
| | | CCTACACTCGACATCGGTAGCTA- |
| | | TTTTTTTTcagccaactccaaTTTTTTTT- |
| | | TAGCTACCGATGTCGAGTGTAGG |
| isl1 | 652 | g-AGCGCCGCGCCCAT-GTTTTAGAGCTA- |
| | | CCTACACTCGACATCGGTAGCTA- |
| | | TTTTTTTTcagccaactccaaTTTTTTTT- |
| | | TAGCTACCGATGTCGAGTGTAGG |
| is11 | 653 | g-CGCCGAGCGGTCAG-GTTTTAGAGCTA- |
| | | CCCTGGCGGAACGTTCGAGTAAT- |
| | | TTTTTTTTcagccaactccaaTTTTTTTT- |
| | | ATTACTCGAACGTTCCGCCAGGG |
| is11 | 654 | -GTGCACCACGGCGT-GTTTTAGAGCTA- |
| | | CCCTGGCGGAACGTTCGAGTAAT- |
| | | TTTTTTTTcagccaactccaaTTTTTTTT- |
| | | ATTACTCGAACGTTCCGCCAGGG |
| isl1 | 655 | g-CGATGGAGCTGAGT-GTTTTAGAGCTA- |
| | | CCCTGGCGGAACGTTCGAGTAAT- |
| | | TTTTTTTTcagccaactccaaTTTTTTTT- |
| | | ATTACTCGAACGTTCCGCCAGGG |
| isl1 | 656 | g-AGCGCCGCGCCCAT-GTTTTAGAGCTA- |
| | | CCCTGGCGGAACGTTCGAGTAAT- |
| | | TTTTTTTTcagccaactccaaTTTTTTTT- |
| | | ATTACTCGAACGTTCCGCCAGGG |
| is11 | 657 | g-CGCCGAGCGGTCAG-GTTTTAGAGCTA- |
| | | CCTACACGATAGTGGTCGTGCGC- |
| | | TTTTTTTTcagccaactccaaTTTTTTTT- |
| | | GCGCACGACCACTATCGTGTAGG |
| isl1 | 658 | -GTGCACCACGGCGT-GTTTTAGAGCTA- |
| | | CCTACACGATAGTGGTCGTGCGC- |
| | | TTTTTTTTcagccaactccaaTTTTTTTT- |
| | | GCGCACGACCACTATCGTGTAGG |
| isl1 | 659 | g-CGATGGAGCTGAGT-GTTTTAGAGCTA- |
| | | CCTACACGATAGTGGTCGTGCGC- |
| | | TTTTTTTTcagccaactccaaTTTTTTTT- |
| | | GCGCACGACCACTATCGTGTAGG |
| isl1 | 660 | g-AGCGCCGCGCCCAT-GTTTTAGAGCTA- |
| | | CCTACACGATAGTGGTCGTGCGC- |
| | | TTTTTTTTcagccaactccaaTTTTTTTT- |
| | | GCGCACGACCACTATCGTGTAGG |
| isl1 | 661 | g-CGCCGAGCGGTCAG-GTTTTAGAGCTA- |
| | | CCTTCCCGACTTCCGTAGGAGCGC- |
| | | TTTTTTTTcagccaactccaaTTTTTTTT- |
| | | GCGCTCCTACGGAAGTCGGGAAGG |
| is11 | 662 | -GTGCACCACGGCGT-GTTTTAGAGCTA- |
| | | CCTTCCCGACTTCCGTAGGAGCGC- |
| | | TTTTTTTTcagccaactccaaTTTTTTTT- |
| | | GCGCTCCTACGGAAGTCGGGAAGG |
| isl1 | 663 | g-CGATGGAGCTGAGT-GTTTTAGAGCTA- |
| | | CCTTCCCGACTTCCGTAGGAGCGC- |
| | | TTTTTTTTcagccaactccaaTTTTTTTT- |
| | | GCGCTCCTACGGAAGTCGGGAAGG |
| isl1 | 664 | g-AGCGCCGCGCCCAT-GTTTTAGAGCTA- |
| | | CCTTCCCGACTTCCGTAGGAGCGC- |
| | | TTTTTTTTcagccaactccaaTTTTTTTT- |
| | | GCGCTCCTACGGAAGTCGGGAAGG |
| isl1 | 665 | g-CGCCGAGCGGTCAG-GTTTTAGAGCTA- |
| | | CCTGAAGGTAAAGATCGGGTCCTC- |
| | | TTTTTTTTcagccaactccaaTTTTTTTT- |
| | | GAGGACCCGATCTTTACCTTCAGG |
| isl1 | 666 | -GTGCACCACGGCGT-GTTTTAGAGCTA- |
| | | CCTGAAGGTAAAGATCGGGTCCTC- |
| | | TTTTTTTTcagccaactccaaTTTTTTTT- |
| | | GAGGACCCGATCTTTACCTTCAGG |
| isl1 | 667 | g-CGATGGAGCTGAGT-GTTTTAGAGCTA- |
| | | CCTGAAGGTAAAGATCGGGTCCTC- |
| | | TTTTTTTTcagccaactccaaTTTTTTTT- |
| | | GAGGACCCGATCTTTACCTTCAGG |
| isl1 | 668 | g-AGCGCCGCGCCCAT-GTTTTAGAGCTA- |
| | | CCTGAAGGTAAAGATCGGGTCCTC- |
| | | TTTTTTTTcagccaactccaaTTTTTTTT- |
| | | GAGGACCCGATCTTTACCTTCAGG |
| isl1 | 669 | g-CGCCGAGCGGTCAG-GTTTTAGAGCTA- |
| | | CCTGGTTATAGCGGACGCACTGT- |
| | | TTTTTTTTcagccaactccaaTTTTTTTT- |
| | | ACAGTGCGTCCGCTATAACCAGG |
| isl1 | 670 | -GTGCACCACGGCGT-GTTTTAGAGCTA- |
| | | CCTGGTTATAGCGGACGCACTGT- |
| | | TTTTTTTTcagccaactccaaTTTTTTTT- |
| | | ACAGTGCGTCCGCTATAACCAGG |
| isl1 | 671 | g-CGATGGAGCTGAGT-GTTTTAGAGCTA- |
| | | CCTGGTTATAGCGGACGCACTGT- |
| | | TTTTTTTTcagccaactccaaTTTTTTTT- |
| | | ACAGTGCGTCCGCTATAACCAGG |
| isl1 | 672 | g-AGCGCCGCGCCCAT-GTTTTAGAGCTA- |
| | | CCTGGTTATAGCGGACGCACTGT- |
| | | TTTTTTTTcagccaactccaaTTTTTTTT- |
| | | ACAGTGCGTCCGCTATAACCAGG |
| isl1 | 673 | g-CGCCGAGCGGTCAG-GTTTTAGAGCTA- |
| | | CCGCATCGTATTATCTGCGAAGC- |
| | | TTTTTTTTcagccaactccaaTTTTTTTT- |
| | | GCTTCGCAGATAATACGATGCGG |
| is11 | 674 | -GTGCACCACGGCGT-GTTTTAGAGCTA- |
| | | CCGCATCGTATTATCTGCGAAGC- |
| | | TTTTTTTTcagccaactccaaTTTTTTTT- |
| | | GCTTCGCAGATAATACGATGCGG |
| isl1 | 675 | g-CGATGGAGCTGAGT-GTTTTAGAGCTA- |
| | | CCGCATCGTATTATCTGCGAAGC- |
| | | TTTTTTTTcagccaactccaaTTTTTTTT- |
| | | GCTTCGCAGATAATACGATGCGG |
| is11 | 676 | g-AGCGCCGCGCCCAT-GTTTTAGAGCTA- |
| | | CCGCATCGTATTATCTGCGAAGC- |
| | | TTTTTTTTcagccaactccaaTTTTTTTT- |
| | | GCTTCGCAGATAATACGATGCGG |
| isl1 | 677 | g-CGCCGAGCGGTCAG-GTTTTAGAGCTA- |
| | | CCGCTAGGACGTTCAACGGAGTC- |
| | | TTTTTTTTcagccaactccaaTTTTTTTT- |
| | | GACTCCGTTGAACGTCCTAGCGG |
| is11 | 678 | -GTGCACCACGGCGT-GTTTTAGAGCTA- |
| | | CCGCTAGGACGTTCAACGGAGTC- |
| | | TTTTTTTTcagccaactccaaTTTTTTTT- |
| | | GACTCCGTTGAACGTCCTAGCGG |
| isl1 | 679 | g-CGATGGAGCTGAGT-GTTTTAGAGCTA- |
| | | CCGCTAGGACGTTCAACGGAGTC- |
| | | TTTTTTTTcagccaactccaaTTTTTTTT- |
| | | GACTCCGTTGAACGTCCTAGCGG |
| isl1 | 680 | g-AGCGCCGCGCCCAT-GTTTTAGAGCTA- |
| | | CCGCTAGGACGTTCAACGGAGTC- |
| | | TTTTTTTTcagccaactccaaTTTTTTTT- |
| | | GACTCCGTTGAACGTCCTAGCGG |
| isl1 | 681 | g-CGCCGAGCGGTCAG-GTTTTAGAGCTA- |
| | | CCATAGCGGTACTATCGGCATCT- |
| | | TTTTTTTTcagccaactccaaTTTTTTTT- |
| | | AGATGCCGATAGTACCGCTATGG |
| isl1 | 682 | -GTGCACCACGGCGT-GTTTTAGAGCTA- |
| | | CCATAGCGGTACTATCGGCATCT- |
| | | TTTTTTTTcagccaactccaaTTTTTTTT- |
| | | AGATGCCGATAGTACCGCTATGG |
| isl1 | 683 | g-CGATGGAGCTGAGT-GTTTTAGAGCTA- |
| | | CCATAGCGGTACTATCGGCATCT- |
| | | TTTTTTTTcagccaactccaaTTTTTTTT- |
| | | AGATGCCGATAGTACCGCTATGG |
| isl1 | 684 | g-AGCGCCGCGCCCAT-GTTTTAGAGCTA- |
| | | CCATAGCGGTACTATCGGCATCT- |
| | | TTTTTTTTcagccaactccaaTTTTTTTT- |
| | | AGATGCCGATAGTACCGCTATGG |
| is11 | 685 | g-CGCCGAGCGGTCAG-GTTTTAGAGCTA- |
| | | CCTCGTACTAGTCTCGCATGACC- |
| | | TTTTTTTTcagccaactccaaTTTTTTTT- |
| | | GGTCATGCGAGACTAGTACGAGG |
| is11 | 686 | -GTGCACCACGGCGT-GTTTTAGAGCTA- |
| | | CCTCGTACTAGTCTCGCATGACC- |
| | | TTTTTTTTcagccaactccaaTTTTTTTT- |
| | | GGTCATGCGAGACTAGTACGAGG |
| isl1 | 687 | g-CGATGGAGCTGAGT-GTTTTAGAGCTA- |
| | | CCTCGTACTAGTCTCGCATGACC- |
| | | TTTTTTTTcagccaactccaaTTTTTTTT- |
| | | GGTCATGCGAGACTAGTACGAGG |
| isl1 | 688 | g-AGCGCCGCGCCCAT-GTTTTAGAGCTA- |
| | | CCTCGTACTAGTCTCGCATGACC- |
| | | TTTTTTTTcagccaactccaaTTTTTTTT- |
| | | GGTCATGCGAGACTAGTACGAGG |
| isl1 | 689 | g-CGCCGAGCGGTCAG-GTTTTAGAGCTA- |
| | | CCGATAGTGCTAAACGACGCTTT- |
| | | TTTTTTTTcagccaactccaaTTTTTTTT- |
| | | AAAGCGTCGTTTAGCACTATCGG |
| is11 | 690 | -GTGCACCACGGCGT-GTTTTAGAGCTA- |
| | | CCGATAGTGCTAAACGACGCTTT- |
| | | TTTTTTTTcagccaactccaaTTTTTTTT- |
| | | AAAGCGTCGTTTAGCACTATCGG |
| isl1 | 691 | g-CGATGGAGCTGAGT-GTTTTAGAGCTA- |
| | | CCGATAGTGCTAAACGACGCTTT- |
| | | TTTTTTTTcagccaactccaaTTTTTTTT- |
| | | AAAGCGTCGTTTAGCACTATCGG |
| isl1 | 692 | g-AGCGCCGCGCCCAT-GTTTTAGAGCTA- |
| | | CCGATAGTGCTAAACGACGCTTT- |
| | | TTTTTTTTcagccaactccaaTTTTTTTT- |
| | | AAAGCGTCGTTTAGCACTATCGG |
| isl1 | 693 | g-CGCCGAGCGGTCAG-GTTTTAGAGCTA- |
| | | CCCGTTATCGACGTTCAAGGAAC- |
| | | TTTTTTTTcagccaactccaaTTTTTTTT- |
| | | GTTCCTTGAACGTCGATAACGGG |
| is11 | 694 | -GTGCACCACGGCGT-GTTTTAGAGCTA- |
| | | CCCGTTATCGACGTTCAAGGAAC- |
| | | TTTTTTTTcagccaactccaaTTTTTTTT- |
| | | GTTCCTTGAACGTCGATAACGGG |
| isl1 | 695 | g-CGATGGAGCTGAGT-GTTTTAGAGCTA- |
| | | CCCGTTATCGACGTTCAAGGAAC- |
| | | TTTTTTTTcagccaactccaaTTTTTTTT- |
| | | GTTCCTTGAACGTCGATAACGGG |
| isl1 | 696 | g-AGCGCCGCGCCCAT-GTTTTAGAGCTA- |
| | | CCCGTTATCGACGTTCAAGGAAC- |
| | | TTTTTTTTcagccaactccaaTTTTTTTT- |
| | | GTTCCTTGAACGTCGATAACGGG |
| isl1 | 697 | g-CGCCGAGCGGTCAG-GTTTTAGAGCTA- |
| | | CCGATCAATGCGGTCTGCGTAAC- |
| | | TTTTTTTTcagccaactccaaTTTTTTTT- |
| | | GTTACGCAGACCGCATTGATCGG |
| is11 | 698 | -GTGCACCACGGCGT-GTTTTAGAGCTA- |
| | | CCGATCAATGCGGTCTGCGTAAC- |
| | | TTTTTTTTcagccaactccaaTTTTTTTT- |
| | | GTTACGCAGACCGCATTGATCGG |
| is11 | 699 | g-CGATGGAGCTGAGT-GTTTTAGAGCTA- |
| | | CCGATCAATGCGGTCTGCGTAAC- |
| | | TTTTTTTTcagccaactccaaTTTTTTTT- |
| | | GTTACGCAGACCGCATTGATCGG |
| isl1 | 700 | g-AGCGCCGCGCCCAT-GTTTTAGAGCTA- |
| | | CCGATCAATGCGGTCTGCGTAAC- |
| | | TTTTTTTTcagccaactccaaTTTTTTTT- |
| | | GTTACGCAGACCGCATTGATCGG |
| isl1 | 701 | g-CGCCGAGCGGTCAG-GTTTTAGAGCTA- |
| | | CCCTTACTCGCGATACTCTCGAC- |
| | | TTTTTTTTcagccaactccaaTTTTTTTT- |
| | | GTCGAGAGTATCGCGAGTAAGGG |
| is11 | 702 | -GTGCACCACGGCGT-GTTTTAGAGCTA- |
| | | CCCTTACTCGCGATACTCTCGAC- |
| | | TTTTTTTTcagccaactccaaTTTTTTTT- |
| | | GTCGAGAGTATCGCGAGTAAGGG |
| is11 | 703 | g-CGATGGAGCTGAGT-GTTTTAGAGCTA- |
| | | CCCTTACTCGCGATACTCTCGAC- |
| | | TTTTTTTTcagccaactccaaTTTTTTTT- |
| | | GTCGAGAGTATCGCGAGTAAGGG |
| isl1 | 704 | g-AGCGCCGCGCCCAT-GTTTTAGAGCTA- |
| | | CCCTTACTCGCGATACTCTCGAC- |
| | | TTTTTTTTcagccaactccaaTTTTTTTT- |
| | | GTCGAGAGTATCGCGAGTAAGGG |
| isl1 | 705 | g-CGCCGAGCGGTCAG-GTTTTAGAGCTA- |
| | | CCGCGGACGGTAAGCACGGAATA- |
| | | TTTTTTTTcagccaactccaaTTTTTTTT- |
| | | TATTCCGTGCTTACCGTCCGCGG |
| | 706 | -GTGCACCACGGCGT-GTTTTAGAGCTA- |
| | | CCGCGGACGGTAAGCACGGAATA- |
| | | TTTTTTTTcagccaactccaaTTTTTTTT- |
| | | TATTCCGTGCTTACCGTCCGCGG |
| isl1 | 707 | g-CGATGGAGCTGAGT-GTTTTAGAGCTA- |
| | | CCGCGGACGGTAAGCACGGAATA- |
| | | TTTTTTTTcagccaactccaaTTTTTTTT- |
| | | TATTCCGTGCTTACCGTCCGCGG |
| isl1 | 708 | g-AGCGCCGCGCCCAT-GTTTTAGAGCTA- |
| | | CCGCGGACGGTAAGCACGGAATA- |
| | | TTTTTTTTcagccaactccaaTTTTTTTT- |
| | | TATTCCGTGCTTACCGTCCGCGG |
| isl1 | 709 | g-CGCCGAGCGGTCAG-GTTTTAGAGCTA- |
| | | CCTATAGTCACGAATCGTAGGGT- |
| | | TTTTTTTTcagccaactccaaTTTTTTTT- |
| | | ACCCTACGATTCGTGACTATAGG |
| isl1 | 710 | -GTGCACCACGGCGT-GTTTTAGAGCTA- |
| | | CCTATAGTCACGAATCGTAGGGT- |
| | | TTTTTTTTcagccaactccaaTTTTTTTT- |
| | | ACCCTACGATTCGTGACTATAGG |
| isl1 | 711 | g-CGATGGAGCTGAGT-GTTTTAGAGCTA- |
| | | CCTATAGTCACGAATCGTAGGGT- |
| | | TTTTTTTTcagccaactccaaTTTTTTTT- |
| | | ACCCTACGATTCGTGACTATAGG |
| is11 | 712 | g-AGCGCCGCGCCCAT-GTTTTAGAGCTA- |
| | | CCTATAGTCACGAATCGTAGGGT- |
| | | TTTTTTTTcagccaactccaaTTTTTTTT- |
| | | ACCCTACGATTCGTGACTATAGG |
| isl1 | 713 | g-CGCCGAGCGGTCAG-GTTTTAGAGCTA- |
| | | CCCGTCGTCACGTATGCGTAGCA- |
| | | TTTTTTTTcagccaactccaaTTTTTTTT- |
| | | TGCTACGCATACGTGACGACGGG |
| isl1 | 714 | -GTGCACCACGGCGT-GTTTTAGAGCTA- |
| | | CCCGTCGTCACGTATGCGTAGCA- |
| | | TTTTTTTTcagccaactccaaTTTTTTTT- |
| | | TGCTACGCATACGTGACGACGGG |
| isl1 | 715 | g-CGATGGAGCTGAGT-GTTTTAGAGCTA- |
| | | CCCGTCGTCACGTATGCGTAGCA- |
| | | TTTTTTTTcagccaactccaaTTTTTTTT- |
| | | TGCTACGCATACGTGACGACGGG |
| isl1 | 716 | g-AGCGCCGCGCCCAT-GTTTTAGAGCTA- |
| | | CCCGTCGTCACGTATGCGTAGCA- |
| | | TTTTTTTTcagccaactccaaTTTTTTTT- |
| | | TGCTACGCATACGTGACGACGGG |
| isl1 | 717 | g-CGCCGAGCGGTCAG-GTTTTAGAGCTA- |
| | | CCCGAGAGGTAGTAGACGACGCA- |
| | | TTTTTTTTcagccaactccaaTTTTTTTT- |
| | | TGCGTCGTCTACTACCTCTCGGG |
| is11 | 718 | -GTGCACCACGGCGT-GTTTTAGAGCTA- |
| | | CCCGAGAGGTAGTAGACGACGCA- |
| | | TTTTTTTTcagccaactccaaTTTTTTTT- |
| | | TGCGTCGTCTACTACCTCTCGGG |
| is11 | 719 | g-CGATGGAGCTGAGT-GTTTTAGAGCTA- |
| | | CCCGAGAGGTAGTAGACGACGCA- |
| | | TTTTTTTTcagccaactccaaTTTTTTTT- |
| | | TGCGTCGTCTACTACCTCTCGGG |
| isl1 | 720 | g-AGCGCCGCGCCCAT-GTTTTAGAGCTA- |
| | | CCCGAGAGGTAGTAGACGACGCA- |
| | | TTTTTTTTcagccaactccaaTTTTTTTT- |
| | | TGCGTCGTCTACTACCTCTCGGG |
| is11 | 721 | g-CGCCGAGCGGTCAG-GTTTTAGAGCTA- |
| | | CCGACGTCTACGGACGGGAGCTA- |
| | | TTTTTTTTcagccaactccaaTTTTTTTT- |
| | | TAGCTCCCGTCCGTAGACGTCGG |
| isl1 | 722 | -GTGCACCACGGCGT-GTTTTAGAGCTA- |
| | | CCGACGTCTACGGACGGGAGCTA- |
| | | TTTTTTTTcagccaactccaaTTTTTTTT- |
| | | TAGCTCCCGTCCGTAGACGTCGG |
| is11 | 723 | g-CGATGGAGCTGAGT-GTTTTAGAGCTA- |
| | | CCGACGTCTACGGACGGGAGCTA- |
| | | TTTTTTTTcagccaactccaaTTTTTTTT- |
| | | TAGCTCCCGTCCGTAGACGTCGG |
| isl1 | 724 | g-AGCGCCGCGCCCAT-GTTTTAGAGCTA- |
| | | CCGACGTCTACGGACGGGAGCTA- |
| | | TTTTTTTTcagccaactccaaTTTTTTTT- |
| | | TAGCTCCCGTCCGTAGACGTCGG |
| isl1 | 725 | g-CGCCGAGCGGTCAG-GTTTTAGAGCTA- |
| | | CCAAAGCTCATTCGCGACTGAGC- |
| | | TTTTTTTTcagccaactccaaTTTTTTTT- |
| | | GCTCAGTCGCGAATGAGCTTTGG |
| isl1 | 726 | -GTGCACCACGGCGT-GTTTTAGAGCTA- |
| | | CCAAAGCTCATTCGCGACTGAGC- |
| | | TTTTTTTTcagccaactccaaTTTTTTTT- |
| | | GCTCAGTCGCGAATGAGCTTTGG |
| isl1 | 727 | g-CGATGGAGCTGAGT-GTTTTAGAGCTA- |
| | | CCAAAGCTCATTCGCGACTGAGC- |
| | | TTTTTTTTcagccaactccaaTTTTTTTT- |
| | | GCTCAGTCGCGAATGAGCTTTGG |
| isl1 | 728 | g-AGCGCCGCGCCCAT-GTTTTAGAGCTA- |
| | | CCAAAGCTCATTCGCGACTGAGC- |
| | | TTTTTTTTcagccaactccaaTTTTTTTT- |
| | | GCTCAGTCGCGAATGAGCTTTGG |
| is11 | 729 | g-CGCCGAGCGGTCAG-GTTTTAGAGCTA- |
| | | CCATGGCACGATCGACACGGAGG- |
| | | TTTTTTTTcagccaactccaaTTTTTTTT- |
| | | CCTCCGTGTCGATCGTGCCATGG |
| isl1 | 730 | -GTGCACCACGGCGT-GTTTTAGAGCTA- |
| | | CCATGGCACGATCGACACGGAGG- |
| | | TTTTTTTTcagccaactccaaTTTTTTTT- |
| | | CCTCCGTGTCGATCGTGCCATGG |
| is11 | 731 | g-CGATGGAGCTGAGT-GTTTTAGAGCTA- |
| | | CCATGGCACGATCGACACGGAGG- |
| | | TTTTTTTTcagccaactccaaTTTTTTTT- |
| | | CCTCCGTGTCGATCGTGCCATGG |
| isl1 | 732 | g-AGCGCCGCGCCCAT-GTTTTAGAGCTA- |
| | | CCATGGCACGATCGACACGGAGG- |
| | | TTTTTTTTcagccaactccaaTTTTTTTT- |
| | | CCTCCGTGTCGATCGTGCCATGG |
| isl1 | 733 | g-CGCCGAGCGGTCAG-GTTTTAGAGCTA- |
| | | CCCGAACTCTCTATCGAACGAGT- |
| | | TTTTTTTTcagccaactccaaTTTTTTTT- |
| | | ACTCGTTCGATAGAGAGTTCGGG |
| isl1 | 734 | -GTGCACCACGGCGT-GTTTTAGAGCTA- |
| | | CCCGAACTCTCTATCGAACGAGT- |
| | | TTTTTTTTcagccaactccaaTTTTTTTT- |
| | | ACTCGTTCGATAGAGAGTTCGGG |
| isl1 | 735 | g-CGATGGAGCTGAGT-GTTTTAGAGCTA- |
| | | CCCGAACTCTCTATCGAACGAGT- |
| | | TTTTTTTTcagccaactccaaTTTTTTTT- |
| | | ACTCGTTCGATAGAGAGTTCGGG |
| isl1 | 736 | g-AGCGCCGCGCCCAT-GTTTTAGAGCTA- |
| | | CCCGAACTCTCTATCGAACGAGT- |
| | | TTTTTTTTcagccaactccaaTTTTTTTT- |
| | | ACTCGTTCGATAGAGAGTTCGGG |
| LMX1A | 737 | g-AAGGGGCACTGTAA-GTTTTAGAGCTA- |
| | | CCGTCGTTGTACCGTCTACTTGAC- |
| | | TTTTTTTTcagccaactccaaTTTTTTTT- |
| | | GTCAAGTAGACGGTACAACGACGG |
| LMX1A | 738 | -GCAAAGGCCCAGTC-GTTTTAGAGCTA- |
| | | CCGTCGTTGTACCGTCTACTTGAC- |
| | | TTTTTTTTcagccaactccaaTTTTTTTT- |
| | | GTCAAGTAGACGGTACAACGACGG |
| LMX1A | 739 | g-CACGGCCCCGCCAC-GTTTTAGAGCTA- |
| | | CCGTCGTTGTACCGTCTACTTGAC- |
| | | TTTTTTTTcagccaactccaaTTTTTTTT- |
| | | GTCAAGTAGACGGTACAACGACGG |
| LMX1A | 740 | -GAACGCAGCTACTG-GTTTTAGAGCTA- |
| | | CCGTCGTTGTACCGTCTACTTGAC- |
| | | TTTTTTTTcagccaactccaaTTTTTTTT- |
| | | GTCAAGTAGACGGTACAACGACGG |
| LMX1A | 741 | g-AAGGGGCACTGTAA-GTTTTAGAGCTA- |
| | | CCTACACTCGACATCGGTAGCTA- |
| | | TTTTTTTTcagccaactccaaTTTTTTTT- |
| | | TAGCTACCGATGTCGAGTGTAGG |
| LMX1A | 742 | -GCAAAGGCCCAGTC-GTTTTAGAGCTA- |
| | | CCTACACTCGACATCGGTAGCTA- |
| | | TTTTTTTTcagccaactccaaTTTTTTTT- |
| | | TAGCTACCGATGTCGAGTGTAGG |
| LMX1A | 743 | g-CACGGCCCCGCCAC-GTTTTAGAGCTA- |
| | | CCTACACTCGACATCGGTAGCTA- |
| | | TTTTTTTTcagccaactccaaTTTTTTTT- |
| | | TAGCTACCGATGTCGAGTGTAGG |
| LMX1A | 744 | -GAACGCAGCTACTG-GTTTTAGAGCTA- |
| | | CCTACACTCGACATCGGTAGCTA- |
| | | TTTTTTTTcagccaactccaaTTTTTTTT- |
| | | TAGCTACCGATGTCGAGTGTAGG |
| LMX1A | 745 | g-AAGGGGCACTGTAA-GTTTTAGAGCTA- |
| | | CCCTGGCGGAACGTTCGAGTAAT- |
| | | TTTTTTTTcagccaactccaaTTTTTTTT- |
| | | ATTACTCGAACGTTCCGCCAGGG |
| LMX1A | 746 | -GCAAAGGCCCAGTC-GTTTTAGAGCTA- |
| | | CCCTGGCGGAACGTTCGAGTAAT- |
| | | TTTTTTTTcagccaactccaaTTTTTTTT- |
| | | ATTACTCGAACGTTCCGCCAGGG |
| LMX1A | 747 | g-CACGGCCCCGCCAC-GTTTTAGAGCTA- |
| | | CCCTGGCGGAACGTTCGAGTAAT- |
| | | TTTTTTTTcagccaactccaaTTTTTTTT- |
| | | ATTACTCGAACGTTCCGCCAGGG |
| LMX1A | 748 | -GAACGCAGCTACTG-GTTTTAGAGCTA- |
| | | CCCTGGCGGAACGTTCGAGTAAT- |
| | | TTTTTTTTcagccaactccaaTTTTTTTT- |
| | | ATTACTCGAACGTTCCGCCAGGG |
| LMX1A | 749 | g-AAGGGGCACTGTAA-GTTTTAGAGCTA- |
| | | CCTACACGATAGTGGTCGTGCGC- |
| | | TTTTTTTTcagccaactccaaTTTTTTTT- |
| | | GCGCACGACCACTATCGTGTAGG |
| LMX1A | 750 | -GCAAAGGCCCAGTC-GTTTTAGAGCTA- |
| | | CCTACACGATAGTGGTCGTGCGC- |
| | | TTTTTTTTcagccaactccaaTTTTTTTT- |
| | | GCGCACGACCACTATCGTGTAGG |
| LMX1A | 751 | g-CACGGCCCCGCCAC-GTTTTAGAGCTA- |
| | | CCTACACGATAGTGGTCGTGCGC- |
| | | TTTTTTTTcagccaactccaaTTTTTTTT- |
| | | GCGCACGACCACTATCGTGTAGG |
| LMX1A | 752 | -GAACGCAGCTACTG-GTTTTAGAGCTA- |
| | | CCTACACGATAGTGGTCGTGCGC- |
| | | TTTTTTTTcagccaactccaaTTTTTTTT- |
| | | GCGCACGACCACTATCGTGTAGG |
| LMX1A | 753 | g-AAGGGGCACTGTAA-GTTTTAGAGCTA- |
| | | CCTTCCCGACTTCCGTAGGAGCGC- |
| | | TTTTTTTTcagccaactccaaTTTTTTTT- |
| | | GCGCTCCTACGGAAGTCGGGAAGG |
| LMX1A | 754 | -GCAAAGGCCCAGTC-GTTTTAGAGCTA- |
| | | CCTTCCCGACTTCCGTAGGAGCGC- |
| | | TTTTTTTTcagccaactccaaTTTTTTTT- |
| | | GCGCTCCTACGGAAGTCGGGAAGG |
| LMX1A | 755 | g-CACGGCCCCGCCAC-GTTTTAGAGCTA- |
| | | CCTTCCCGACTTCCGTAGGAGCGC- |
| | | TTTTTTTTcagccaactccaaTTTTTTTT- |
| | | GCGCTCCTACGGAAGTCGGGAAGG |
| LMX1A | 756 | -GAACGCAGCTACTG-GTTTTAGAGCTA- |
| | | CCTTCCCGACTTCCGTAGGAGCGC- |
| | | TTTTTTTTcagccaactccaaTTTTTTTT- |
| | | GCGCTCCTACGGAAGTCGGGAAGG |
| LMX1A | 757 | g-AAGGGGCACTGTAA-GTTTTAGAGCTA- |
| | | CCTGAAGGTAAAGATCGGGTCCTC- |
| | | TTTTTTTTcagccaactccaaTTTTTTTT- |
| | | GAGGACCCGATCTTTACCTTCAGG |
| LMX1A | 758 | -GCAAAGGCCCAGTC-GTTTTAGAGCTA- |
| | | CCTGAAGGTAAAGATCGGGTCCTC- |
| | | TTTTTTTTcagccaactccaaTTTTTTTT- |
| | | GAGGACCCGATCTTTACCTTCAGG |
| LMX1A | 759 | g-CACGGCCCCGCCAC-GTTTTAGAGCTA- |
| | | CCTGAAGGTAAAGATCGGGTCCTC- |
| | | TTTTTTTTcagccaactccaaTTTTTTTT- |
| | | GAGGACCCGATCTTTACCTTCAGG |
| LMX1A | 760 | -GAACGCAGCTACTG-GTTTTAGAGCTA- |
| | | CCTGAAGGTAAAGATCGGGTCCTC- |
| | | TTTTTTTTcagccaactccaaTTTTTTTT- |
| | | GAGGACCCGATCTTTACCTTCAGG |
| LMX1A | 761 | g-AAGGGGCACTGTAA-GTTTTAGAGCTA- |
| | | CCTGGTTATAGCGGACGCACTGT- |
| | | TTTTTTTTcagccaactccaaTTTTTTTT- |
| | | ACAGTGCGTCCGCTATAACCAGG |
| LMX1A | 762 | -GCAAAGGCCCAGTC-GTTTTAGAGCTA- |
| | | CCTGGTTATAGCGGACGCACTGT- |
| | | TTTTTTTTcagccaactccaaTTTTTTTT- |
| | | ACAGTGCGTCCGCTATAACCAGG |
| LMX1A | 763 | g-CACGGCCCCGCCAC-GTTTTAGAGCTA- |
| | | CCTGGTTATAGCGGACGCACTGT- |
| | | TTTTTTTTcagccaactccaaTTTTTTTT- |
| | | ACAGTGCGTCCGCTATAACCAGG |
| LMX1A | 764 | -GAACGCAGCTACTG-GTTTTAGAGCTA- |
| | | CCTGGTTATAGCGGACGCACTGT- |
| | | TTTTTTTTcagccaactccaaTTTTTTTT- |
| | | ACAGTGCGTCCGCTATAACCAGG |
| LMX1A | 765 | g-AAGGGGCACTGTAA-GTTTTAGAGCTA- |
| | | CCGCATCGTATTATCTGCGAAGC- |
| | | TTTTTTTTcagccaactccaaTTTTTTTT- |
| | | GCTTCGCAGATAATACGATGCGG |
| LMX1A | 766 | -GCAAAGGCCCAGTC-GTTTTAGAGCTA- |
| | | CCGCATCGTATTATCTGCGAAGC- |
| | | TTTTTTTTcagccaactccaaTTTTTTTT- |
| | | GCTTCGCAGATAATACGATGCGG |
| LMX1A | 767 | g-CACGGCCCCGCCAC-GTTTTAGAGCTA- |
| | | CCGCATCGTATTATCTGCGAAGC- |
| | | TTTTTTTTcagccaactccaaTTTTTTTT- |
| | | GCTTCGCAGATAATACGATGCGG |
| LMX1A | 768 | -GAACGCAGCTACTG-GTTTTAGAGCTA- |
| | | CCGCATCGTATTATCTGCGAAGC- |
| | | TTTTTTTTcagccaactccaaTTTTTTTT- |
| | | GCTTCGCAGATAATACGATGCGG |
| LMX1A | 769 | g-AAGGGGCACTGTAA-GTTTTAGAGCTA- |
| | | CCGCTAGGACGTTCAACGGAGTC- |
| | | TTTTTTTTcagccaactccaaTTTTTTTT- |
| | | GACTCCGTTGAACGTCCTAGCGG |
| LMX1A | 770 | -GCAAAGGCCCAGTC-GTTTTAGAGCTA- |
| | | CCGCTAGGACGTTCAACGGAGTC- |
| | | TTTTTTTTcagccaactccaaTTTTTTTT- |
| | | GACTCCGTTGAACGTCCTAGCGG |
| LMX1A | 771 | g-CACGGCCCCGCCAC-GTTTTAGAGCTA- |
| | | CCGCTAGGACGTTCAACGGAGTC- |
| | | TTTTTTTTcagccaactccaaTTTTTTTT- |
| | | GACTCCGTTGAACGTCCTAGCGG |
| LMX1A | 772 | -GAACGCAGCTACTG-GTTTTAGAGCTA- |
| | | CCGCTAGGACGTTCAACGGAGTC- |
| | | TTTTTTTTcagccaactccaaTTTTTTTT- |
| | | GACTCCGTTGAACGTCCTAGCGG |
| LMX1A | 773 | g-AAGGGGCACTGTAA-GTTTTAGAGCTA- |
| | | CCATAGCGGTACTATCGGCATCT- |
| | | TTTTTTTTcagccaactccaaTTTTTTTT- |
| | | AGATGCCGATAGTACCGCTATGG |
| LMX1A | 774 | -GCAAAGGCCCAGTC-GTTTTAGAGCTA- |
| | | CCATAGCGGTACTATCGGCATCT- |
| | | TTTTTTTTcagccaactccaaTTTTTTTT- |
| | | AGATGCCGATAGTACCGCTATGG |
| LMX1A | 775 | g-CACGGCCCCGCCAC-GTTTTAGAGCTA- |
| | | CCATAGCGGTACTATCGGCATCT- |
| | | TTTTTTTTcagccaactccaaTTTTTTTT- |
| | | AGATGCCGATAGTACCGCTATGG |
| LMX1A | 776 | -GAACGCAGCTACTG-GTTTTAGAGCTA- |
| | | CCATAGCGGTACTATCGGCATCT- |
| | | TTTTTTTTcagccaactccaaTTTTTTTT- |
| | | AGATGCCGATAGTACCGCTATGG |
| LMX1A | 777 | g-AAGGGGCACTGTAA-GTTTTAGAGCTA- |
| | | CCTCGTACTAGTCTCGCATGACC- |
| | | TTTTTTTTcagccaactccaaTTTTTTTT- |
| | | GGTCATGCGAGACTAGTACGAGG |
| LMX1A | 778 | -GCAAAGGCCCAGTC-GTTTTAGAGCTA- |
| | | CCTCGTACTAGTCTCGCATGACC- |
| | | TTTTTTTTcagccaactccaaTTTTTTTT- |
| | | GGTCATGCGAGACTAGTACGAGG |
| LMX1A | 779 | g-CACGGCCCCGCCAC-GTTTTAGAGCTA- |
| | | CCTCGTACTAGTCTCGCATGACC- |
| | | TTTTTTTTcagccaactccaaTTTTTTTT- |
| | | GGTCATGCGAGACTAGTACGAGG |
| LMX1A | 780 | -GAACGCAGCTACTG-GTTTTAGAGCTA- |
| | | CCTCGTACTAGTCTCGCATGACC- |
| | | TTTTTTTTcagccaactccaaTTTTTTTT- |
| | | GGTCATGCGAGACTAGTACGAGG |
| LMX1A | 781 | g-AAGGGGCACTGTAA-GTTTTAGAGCTA- |
| | | CCGATAGTGCTAAACGACGCTTT- |
| | | TTTTTTTTcagccaactccaaTTTTTTTT- |
| | | AAAGCGTCGTTTAGCACTATCGG |
| LMX1A | 782 | -GCAAAGGCCCAGTC-GTTTTAGAGCTA- |
| | | CCGATAGTGCTAAACGACGCTTT- |
| | | TTTTTTTTcagccaactccaaTTTTTTTT- |
| | | AAAGCGTCGTTTAGCACTATCGG |
| LMX1A | 783 | g-CACGGCCCCGCCAC-GTTTTAGAGCTA- |
| | | CCGATAGTGCTAAACGACGCTTT- |
| | | TTTTTTTTcagccaactccaaTTTTTTTT- |
| | | AAAGCGTCGTTTAGCACTATCGG |
| LMX1A | 784 | -GAACGCAGCTACTG-GTTTTAGAGCTA- |
| | | CCGATAGTGCTAAACGACGCTTT- |
| | | TTTTTTTTcagccaactccaaTTTTTTTT- |
| | | AAAGCGTCGTTTAGCACTATCGG |
| LMX1A | 785 | g-AAGGGGCACTGTAA-GTTTTAGAGCTA- |
| | | CCCGTTATCGACGTTCAAGGAAC- |
| | | TTTTTTTTcagccaactccaaTTTTTTTT- |
| | | GTTCCTTGAACGTCGATAACGGG |
| LMX1A | 786 | -GCAAAGGCCCAGTC-GTTTTAGAGCTA- |
| | | CCCGTTATCGACGTTCAAGGAAC- |
| | | TTTTTTTTcagccaactccaaTTTTTTTT- |
| | | GTTCCTTGAACGTCGATAACGGG |
| LMX1A | 787 | g-CACGGCCCCGCCAC-GTTTTAGAGCTA- |
| | | CCCGTTATCGACGTTCAAGGAAC- |
| | | TTTTTTTTcagccaactccaaTTTTTTTT- |
| | | GTTCCTTGAACGTCGATAACGGG |
| LMX1A | 788 | -GAACGCAGCTACTG-GTTTTAGAGCTA- |
| | | CCCGTTATCGACGTTCAAGGAAC- |
| | | TTTTTTTTcagccaactccaaTTTTTTTT- |
| | | GTTCCTTGAACGTCGATAACGGG |
| LMX1A | 789 | g-AAGGGGCACTGTAA-GTTTTAGAGCTA- |
| | | CCGATCAATGCGGTCTGCGTAAC- |
| | | TTTTTTTTcagccaactccaaTTTTTTTT- |
| | | GTTACGCAGACCGCATTGATCGG |
| LMX1A | 790 | -GCAAAGGCCCAGTC-GTTTTAGAGCTA- |
| | | CCGATCAATGCGGTCTGCGTAAC- |
| | | TTTTTTTTcagccaactccaaTTTTTTTT- |
| | | GTTACGCAGACCGCATTGATCGG |
| LMX1A | 791 | g-CACGGCCCCGCCAC-GTTTTAGAGCTA- |
| | | CCGATCAATGCGGTCTGCGTAAC- |
| | | TTTTTTTTcagccaactccaaTTTTTTTT- |
| | | GTTACGCAGACCGCATTGATCGG |
| LMX1A | 792 | -GAACGCAGCTACTG-GTTTTAGAGCTA- |
| | | CCGATCAATGCGGTCTGCGTAAC- |
| | | TTTTTTTTcagccaactccaaTTTTTTTT- |
| | | GTTACGCAGACCGCATTGATCGG |
| LMX1A | 793 | g-AAGGGGCACTGTAA-GTTTTAGAGCTA- |
| | | CCCTTACTCGCGATACTCTCGAC- |
| | | TTTTTTTTcagccaactccaaTTTTTTTT- |
| | | GTCGAGAGTATCGCGAGTAAGGG |
| LMX1A | 794 | -GCAAAGGCCCAGTC-GTTTTAGAGCTA- |
| | | CCCTTACTCGCGATACTCTCGAC- |
| | | TTTTTTTTcagccaactccaaTTTTTTTT- |
| | | GTCGAGAGTATCGCGAGTAAGGG |
| LMX1A | 795 | g-CACGGCCCCGCCAC-GTTTTAGAGCTA- |
| | | CCCTTACTCGCGATACTCTCGAC- |
| | | TTTTTTTTcagccaactccaaTTTTTTTT- |
| | | GTCGAGAGTATCGCGAGTAAGGG |
| LMX1A | 796 | -GAACGCAGCTACTG-GTTTTAGAGCTA- |
| | | CCCTTACTCGCGATACTCTCGAC- |
| | | TTTTTTTTcagccaactccaaTTTTTTTT- |
| | | GTCGAGAGTATCGCGAGTAAGGG |
| LMX1A | 797 | g-AAGGGGCACTGTAA-GTTTTAGAGCTA- |
| | | CCGCGGACGGTAAGCACGGAATA- |
| | | TTTTTTTTcagccaactccaaTTTTTTTT- |
| | | TATTCCGTGCTTACCGTCCGCGG |
| LMX1A | 798 | -GCAAAGGCCCAGTC-GTTTTAGAGCTA- |
| | | CCGCGGACGGTAAGCACGGAATA- |
| | | TTTTTTTTcagccaactccaaTTTTTTTT- |
| | | TATTCCGTGCTTACCGTCCGCGG |
| LMX1A | 799 | g-CACGGCCCCGCCAC-GTTTTAGAGCTA- |
| | | CCGCGGACGGTAAGCACGGAATA- |
| | | TTTTTTTTcagccaactccaaTTTTTTTT- |
| | | TATTCCGTGCTTACCGTCCGCGG |
| LMX1A | 800 | -GAACGCAGCTACTG-GTTTTAGAGCTA- |
| | | CCGCGGACGGTAAGCACGGAATA- |
| | | TTTTTTTTcagccaactccaaTTTTTTTT- |
| | | TATTCCGTGCTTACCGTCCGCGG |
| LMX1A | 801 | g-AAGGGGCACTGTAA-GTTTTAGAGCTA- |
| | | CCTATAGTCACGAATCGTAGGGT- |
| | | TTTTTTTTcagccaactccaaTTTTTTTT- |
| | | ACCCTACGATTCGTGACTATAGG |
| LMX1A | 802 | -GCAAAGGCCCAGTC-GTTTTAGAGCTA- |
| | | CCTATAGTCACGAATCGTAGGGT- |
| | | TTTTTTTTcagccaactccaaTTTTTTTT- |
| | | ACCCTACGATTCGTGACTATAGG |
| LMX1A | 803 | g-CACGGCCCCGCCAC-GTTTTAGAGCTA- |
| | | CCTATAGTCACGAATCGTAGGGT- |
| | | TTTTTTTTcagccaactccaaTTTTTTTT- |
| | | ACCCTACGATTCGTGACTATAGG |
| LMX1A | 804 | -GAACGCAGCTACTG-GTTTTAGAGCTA- |
| | | CCTATAGTCACGAATCGTAGGGT- |
| | | TTTTTTTTcagccaactccaaTTTTTTTT- |
| | | ACCCTACGATTCGTGACTATAGG |
| LMX1A | 805 | g-AAGGGGCACTGTAA-GTTTTAGAGCTA- |
| | | CCCGTCGTCACGTATGCGTAGCA- |
| | | TTTTTTTTcagccaactccaaTTTTTTTT- |
| | | TGCTACGCATACGTGACGACGGG |
| LMX1A | 806 | -GCAAAGGCCCAGTC-GTTTTAGAGCTA- |
| | | CCCGTCGTCACGTATGCGTAGCA- |
| | | TTTTTTTTcagccaactccaaTTTTTTTT- |
| | | TGCTACGCATACGTGACGACGGG |
| LMX1A | 807 | g-CACGGCCCCGCCAC-GTTTTAGAGCTA- |
| | | CCCGTCGTCACGTATGCGTAGCA- |
| | | TTTTTTTTcagccaactccaaTTTTTTTT- |
| | | TGCTACGCATACGTGACGACGGG |
| LMX1A | 808 | -GAACGCAGCTACTG-GTTTTAGAGCTA- |
| | | CCCGTCGTCACGTATGCGTAGCA- |
| | | TTTTTTTTcagccaactccaaTTTTTTTT- |
| | | TGCTACGCATACGTGACGACGGG |
| LMX1A | 809 | g-AAGGGGCACTGTAA-GTTTTAGAGCTA- |
| | | CCCGAGAGGTAGTAGACGACGCA- |
| | | TTTTTTTTcagccaactccaaTTTTTTTT- |
| | | TGCGTCGTCTACTACCTCTCGGG |
| LMX1A | 810 | -GCAAAGGCCCAGTC-GTTTTAGAGCTA- |
| | | CCCGAGAGGTAGTAGACGACGCA- |
| | | TTTTTTTTcagccaactccaaTTTTTTTT- |
| | | TGCGTCGTCTACTACCTCTCGGG |
| LMX1A | 811 | g-CACGGCCCCGCCAC-GTTTTAGAGCTA- |
| | | CCCGAGAGGTAGTAGACGACGCA- |
| | | TTTTTTTTcagccaactccaaTTTTTTTT- |
| | | TGCGTCGTCTACTACCTCTCGGG |
| LMX1A | 812 | -GAACGCAGCTACTG-GTTTTAGAGCTA- |
| | | CCCGAGAGGTAGTAGACGACGCA- |
| | | TTTTTTTTcagccaactccaaTTTTTTTT- |
| | | TGCGTCGTCTACTACCTCTCGGG |
| LMX1A | 813 | g-AAGGGGCACTGTAA-GTTTTAGAGCTA- |
| | | CCGACGTCTACGGACGGGAGCTA- |
| | | TTTTTTTTcagccaactccaaTTTTTTTT- |
| | | TAGCTCCCGTCCGTAGACGTCGG |
| LMX1A | 814 | -GCAAAGGCCCAGTC-GTTTTAGAGCTA- |
| | | CCGACGTCTACGGACGGGAGCTA- |
| | | TTTTTTTTcagccaactccaaTTTTTTTT- |
| | | TAGCTCCCGTCCGTAGACGTCGG |
| LMX1A | 815 | g-CACGGCCCCGCCAC-GTTTTAGAGCTA- |
| | | CCGACGTCTACGGACGGGAGCTA- |
| | | TTTTTTTTcagccaactccaaTTTTTTTT- |
| | | TAGCTCCCGTCCGTAGACGTCGG |
| LMX1A | 816 | -GAACGCAGCTACTG-GTTTTAGAGCTA- |
| | | CCGACGTCTACGGACGGGAGCTA- |
| | | TTTTTTTTcagccaactccaaTTTTTTTT- |
| | | TAGCTCCCGTCCGTAGACGTCGG |
| LMX1A | 817 | g-AAGGGGCACTGTAA-GTTTTAGAGCTA- |
| | | CCAAAGCTCATTCGCGACTGAGC- |
| | | TTTTTTTTcagccaactccaaTTTTTTTT- |
| | | GCTCAGTCGCGAATGAGCTTTGG |
| LMX1A | 818 | -GCAAAGGCCCAGTC-GTTTTAGAGCTA- |
| | | CCAAAGCTCATTCGCGACTGAGC- |
| | | TTTTTTTTcagccaactccaaTTTTTTTT- |
| | | GCTCAGTCGCGAATGAGCTTTGG |
| LMX1A | 819 | g-CACGGCCCCGCCAC-GTTTTAGAGCTA- |
| | | CCAAAGCTCATTCGCGACTGAGC- |
| | | TTTTTTTTcagccaactccaaTTTTTTTT- |
| | | GCTCAGTCGCGAATGAGCTTTGG |
| LMX1A | 820 | -GAACGCAGCTACTG-GTTTTAGAGCTA- |
| | | CCAAAGCTCATTCGCGACTGAGC- |
| | | TTTTTTTTcagccaactccaaTTTTTTTT- |
| | | GCTCAGTCGCGAATGAGCTTTGG |
| LMX1A | 821 | g-AAGGGGCACTGTAA-GTTTTAGAGCTA- |
| | | CCATGGCACGATCGACACGGAGG- |
| | | TTTTTTTTcagccaactccaaTTTTTTTT- |
| | | CCTCCGTGTCGATCGTGCCATGG |
| LMX1A | 822 | -GCAAAGGCCCAGTC-GTTTTAGAGCTA- |
| | | CCATGGCACGATCGACACGGAGG- |
| | | TTTTTTTTcagccaactccaaTTTTTTTT- |
| | | CCTCCGTGTCGATCGTGCCATGG |
| LMX1A | 823 | g-CACGGCCCCGCCAC-GTTTTAGAGCTA- |
| | | CCATGGCACGATCGACACGGAGG- |
| | | TTTTTTTTcagccaactccaaTTTTTTTT- |
| | | CCTCCGTGTCGATCGTGCCATGG |
| LMX1A | 824 | -GAACGCAGCTACTG-GTTTTAGAGCTA- |
| | | CCATGGCACGATCGACACGGAGG- |
| | | TTTTTTTTcagccaactccaaTTTTTTTT- |
| | | CCTCCGTGTCGATCGTGCCATGG |
| LMX1A | 825 | g-AAGGGGCACTGTAA-GTTTTAGAGCTA- |
| | | CCCGAACTCTCTATCGAACGAGT- |
| | | TTTTTTTTcagccaactccaaTTTTTTTT- |
| | | ACTCGTTCGATAGAGAGTTCGGG |
| LMX1A | 826 | -GCAAAGGCCCAGTC-GTTTTAGAGCTA- |
| | | CCCGAACTCTCTATCGAACGAGT- |
| | | TTTTTTTTcagccaactccaaTTTTTTTT- |
| | | ACTCGTTCGATAGAGAGTTCGGG |
| LMX1A | 827 | g-CACGGCCCCGCCAC-GTTTTAGAGCTA- |
| | | CCCGAACTCTCTATCGAACGAGT- |
| | | TTTTTTTTcagccaactccaaTTTTTTTT- |
| | | ACTCGTTCGATAGAGAGTTCGGG |
| LMX1A | 828 | -GAACGCAGCTACTG-GTTTTAGAGCTA- |
| | | CCCGAACTCTCTATCGAACGAGT- |
| | | TTTTTTTTcagccaactccaaTTTTTTTT- |
| | | ACTCGTTCGATAGAGAGTTCGGG |
| MAFA | 829 | g-ACCCGGCTCTATAA-GTTTTAGAGCTA- |
| | | CCGTCGTTGTACCGTCTACTTGAC- |
| | | TTTTTTTTcagccaactccaaTTTTTTTT- |
| | | GTCAAGTAGACGGTACAACGACGG |
| MAFA | 830 | g-CTCCGATTGGCCCG-GTTTTAGAGCTA- |
| | | CCGTCGTTGTACCGTCTACTTGAC- |
| | | TTTTTTTTcagccaactccaaTTTTTTTT- |
| | | GTCAAGTAGACGGTACAACGACGG |
| MAFA | 831 | -GCAGTGCCCCGTGA-GTTTTAGAGCTA- |
| | | CCGTCGTTGTACCGTCTACTTGAC- |
| | | TTTTTTTTcagccaactccaaTTTTTTTT- |
| | | GTCAAGTAGACGGTACAACGACGG |
| MAFA | 832 | g-AGGAGATTGACAGC-GTTTTAGAGCTA- |
| | | CCGTCGTTGTACCGTCTACTTGAC- |
| | | TTTTTTTTcagccaactccaaTTTTTTTT- |
| | | GTCAAGTAGACGGTACAACGACGG |
| MAFA | 833 | g-ACCCGGCTCTATAA-GTTTTAGAGCTA- |
| | | CCTACACTCGACATCGGTAGCTA- |
| | | TTTTTTTTcagccaactccaaTTTTTTTT- |
| | | TAGCTACCGATGTCGAGTGTAGG |
| MAFA | 834 | g-CTCCGATTGGCCCG-GTTTTAGAGCTA- |
| | | CCTACACTCGACATCGGTAGCTA- |
| | | TTTTTTTTcagccaactccaaTTTTTTTT- |
| | | TAGCTACCGATGTCGAGTGTAGG |
| MAFA | 835 | -GCAGTGCCCCGTGA-GTTTTAGAGCTA- |
| | | CCTACACTCGACATCGGTAGCTA- |
| | | TTTTTTTTcagccaactccaaTTTTTTTT- |
| | | TAGCTACCGATGTCGAGTGTAGG |
| MAFA | 836 | g-AGGAGATTGACAGC-GTTTTAGAGCTA- |
| | | CCTACACTCGACATCGGTAGCTA- |
| | | TTTTTTTTcagccaactccaaTTTTTTTT- |
| | | TAGCTACCGATGTCGAGTGTAGG |
| MAFA | 837 | g-ACCCGGCTCTATAA-GTTTTAGAGCTA- |
| | | CCCTGGCGGAACGTTCGAGTAAT- |
| | | TTTTTTTTcagccaactccaaTTTTTTTT- |
| | | ATTACTCGAACGTTCCGCCAGGG |
| MAFA | 838 | g-CTCCGATTGGCCCG-GTTTTAGAGCTA- |
| | | CCCTGGCGGAACGTTCGAGTAAT- |
| | | TTTTTTTTcagccaactccaaTTTTTTTT- |
| | | ATTACTCGAACGTTCCGCCAGGG |
| MAFA | 839 | -GCAGTGCCCCGTGA-GTTTTAGAGCTA- |
| | | CCCTGGCGGAACGTTCGAGTAAT- |
| | | TTTTTTTTcagccaactccaaTTTTTTTT- |
| | | ATTACTCGAACGTTCCGCCAGGG |
| MAFA | 840 | g-AGGAGATTGACAGC-GTTTTAGAGCTA- |
| | | CCCTGGCGGAACGTTCGAGTAAT- |
| | | TTTTTTTTcagccaactccaaTTTTTTTT- |
| | | ATTACTCGAACGTTCCGCCAGGG |
| MAFA | 841 | g-ACCCGGCTCTATAA-GTTTTAGAGCTA- |
| | | CCTACACGATAGTGGTCGTGCGC- |
| | | TTTTTTTTcagccaactccaaTTTTTTTT- |
| | | GCGCACGACCACTATCGTGTAGG |
| MAFA | 842 | g-CTCCGATTGGCCCG-GTTTTAGAGCTA- |
| | | CCTACACGATAGTGGTCGTGCGC- |
| | | TTTTTTTTcagccaactccaaTTTTTTTT- |
| | | GCGCACGACCACTATCGTGTAGG |
| MAFA | 843 | -GCAGTGCCCCGTGA-GTTTTAGAGCTA- |
| | | CCTACACGATAGTGGTCGTGCGC- |
| | | TTTTTTTTcagccaactccaaTTTTTTTT- |
| | | GCGCACGACCACTATCGTGTAGG |
| MAFA | 844 | g-AGGAGATTGACAGC-GTTTTAGAGCTA- |
| | | CCTACACGATAGTGGTCGTGCGC- |
| | | TTTTTTTTcagccaactccaaTTTTTTTT- |
| | | GCGCACGACCACTATCGTGTAGG |
| MAFA | 845 | g-ACCCGGCTCTATAA-GTTTTAGAGCTA- |
| | | CCTTCCCGACTTCCGTAGGAGCGC- |
| | | TTTTTTTTcagccaactccaaTTTTTTTT- |
| | | GCGCTCCTACGGAAGTCGGGAAGG |
| MAFA | 846 | g-CTCCGATTGGCCCG-GTTTTAGAGCTA- |
| | | CCTTCCCGACTTCCGTAGGAGCGC- |
| | | TTTTTTTTcagccaactccaaTTTTTTTT- |
| | | GCGCTCCTACGGAAGTCGGGAAGG |
| MAFA | 847 | -GCAGTGCCCCGTGA-GTTTTAGAGCTA- |
| | | CCTTCCCGACTTCCGTAGGAGCGC- |
| | | TTTTTTTTcagccaactccaaTTTTTTTT- |
| | | GCGCTCCTACGGAAGTCGGGAAGG |
| MAFA | 848 | g-AGGAGATTGACAGC-GTTTTAGAGCTA- |
| | | CCTTCCCGACTTCCGTAGGAGCGC- |
| | | TTTTTTTTcagccaactccaaTTTTTTTT- |
| | | GCGCTCCTACGGAAGTCGGGAAGG |
| MAFA | 849 | g-ACCCGGCTCTATAA-GTTTTAGAGCTA- |
| | | CCTGAAGGTAAAGATCGGGTCCTC- |
| | | TTTTTTTTcagccaactccaaTTTTTTTT- |
| | | GAGGACCCGATCTTTACCTTCAGG |
| MAFA | 850 | g-CTCCGATTGGCCCG-GTTTTAGAGCTA- |
| | | CCTGAAGGTAAAGATCGGGTCCTC- |
| | | TTTTTTTTcagccaactccaaTTTTTTTT- |
| | | GAGGACCCGATCTTTACCTTCAGG |
| MAFA | 851 | -GCAGTGCCCCGTGA-GTTTTAGAGCTA- |
| | | CCTGAAGGTAAAGATCGGGTCCTC- |
| | | TTTTTTTTcagccaactccaaTTTTTTTT- |
| | | GAGGACCCGATCTTTACCTTCAGG |
| MAFA | 852 | g-AGGAGATTGACAGC-GTTTTAGAGCTA- |
| | | CCTGAAGGTAAAGATCGGGTCCTC- |
| | | TTTTTTTTcagccaactccaaTTTTTTTT- |
| | | GAGGACCCGATCTTTACCTTCAGG |
| MAFA | 853 | g-ACCCGGCTCTATAA-GTTTTAGAGCTA- |
| | | CCTGGTTATAGCGGACGCACTGT- |
| | | TTTTTTTTcagccaactccaaTTTTTTTT- |
| | | ACAGTGCGTCCGCTATAACCAGG |
| MAFA | 854 | g-CTCCGATTGGCCCG-GTTTTAGAGCTA- |
| | | CCTGGTTATAGCGGACGCACTGT- |
| | | TTTTTTTTcagccaactccaaTTTTTTTT- |
| | | ACAGTGCGTCCGCTATAACCAGG |
| MAFA | 855 | -GCAGTGCCCCGTGA-GTTTTAGAGCTA- |
| | | CCTGGTTATAGCGGACGCACTGT- |
| | | TTTTTTTTcagccaactccaaTTTTTTTT- |
| | | ACAGTGCGTCCGCTATAACCAGG |
| MAFA | 856 | g-AGGAGATTGACAGC-GTTTTAGAGCTA- |
| | | CCTGGTTATAGCGGACGCACTGT- |
| | | TTTTTTTTcagccaactccaaTTTTTTTT- |
| | | ACAGTGCGTCCGCTATAACCAGG |
| MAFA | 857 | g-ACCCGGCTCTATAA-GTTTTAGAGCTA- |
| | | CCGCATCGTATTATCTGCGAAGC- |
| | | TTTTTTTTcagccaactccaaTTTTTTTT- |
| | | GCTTCGCAGATAATACGATGCGG |
| MAFA | 858 | g-CTCCGATTGGCCCG-GTTTTAGAGCTA- |
| | | CCGCATCGTATTATCTGCGAAGC- |
| | | TTTTTTTTcagccaactccaaTTTTTTTT- |
| | | GCTTCGCAGATAATACGATGCGG |
| MAFA | 859 | -GCAGTGCCCCGTGA-GTTTTAGAGCTA- |
| | | CCGCATCGTATTATCTGCGAAGC- |
| | | TTTTTTTTcagccaactccaaTTTTTTTT- |
| | | GCTTCGCAGATAATACGATGCGG |
| MAFA | 860 | g-AGGAGATTGACAGC-GTTTTAGAGCTA- |
| | | CCGCATCGTATTATCTGCGAAGC- |
| | | TTTTTTTTcagccaactccaaTTTTTTTT- |
| | | GCTTCGCAGATAATACGATGCGG |
| MAFA | 861 | g-ACCCGGCTCTATAA-GTTTTAGAGCTA- |
| | | CCGCTAGGACGTTCAACGGAGTC- |
| | | TTTTTTTTcagccaactccaaTTTTTTTT- |
| | | GACTCCGTTGAACGTCCTAGCGG |
| MAFA | 862 | g-CTCCGATTGGCCCG-GTTTTAGAGCTA- |
| | | CCGCTAGGACGTTCAACGGAGTC- |
| | | TTTTTTTTcagccaactccaaTTTTTTTT- |
| | | GACTCCGTTGAACGTCCTAGCGG |
| MAFA | 863 | -GCAGTGCCCCGTGA-GTTTTAGAGCTA- |
| | | CCGCTAGGACGTTCAACGGAGTC- |
| | | TTTTTTTTcagccaactccaaTTTTTTTT- |
| | | GACTCCGTTGAACGTCCTAGCGG |
| MAFA | 864 | g-AGGAGATTGACAGC-GTTTTAGAGCTA- |
| | | CCGCTAGGACGTTCAACGGAGTC- |
| | | TTTTTTTTcagccaactccaaTTTTTTTT- |
| | | GACTCCGTTGAACGTCCTAGCGG |
| MAFA | 865 | g-ACCCGGCTCTATAA-GTTTTAGAGCTA- |
| | | CCATAGCGGTACTATCGGCATCT- |
| | | TTTTTTTTcagccaactccaaTTTTTTTT- |
| | | AGATGCCGATAGTACCGCTATGG |
| MAFA | 866 | g-CTCCGATTGGCCCG-GTTTTAGAGCTA- |
| | | CCATAGCGGTACTATCGGCATCT- |
| | | TTTTTTTTcagccaactccaaTTTTTTTT- |
| | | AGATGCCGATAGTACCGCTATGG |
| MAFA | 867 | -GCAGTGCCCCGTGA-GTTTTAGAGCTA- |
| | | CCATAGCGGTACTATCGGCATCT- |
| | | TTTTTTTTcagccaactccaaTTTTTTTT- |
| | | AGATGCCGATAGTACCGCTATGG |
| MAFA | 868 | g-AGGAGATTGACAGC-GTTTTAGAGCTA- |
| | | CCATAGCGGTACTATCGGCATCT- |
| | | TTTTTTTTcagccaactccaaTTTTTTTT- |
| | | AGATGCCGATAGTACCGCTATGG |
| MAFA | 869 | g-ACCCGGCTCTATAA-GTTTTAGAGCTA- |
| | | CCTCGTACTAGTCTCGCATGACC- |
| | | TTTTTTTTcagccaactccaaTTTTTTTT- |
| | | GGTCATGCGAGACTAGTACGAGG |
| MAFA | 870 | g-CTCCGATTGGCCCG-GTTTTAGAGCTA- |
| | | CCTCGTACTAGTCTCGCATGACC- |
| | | TTTTTTTTcagccaactccaaTTTTTTTT- |
| | | GGTCATGCGAGACTAGTACGAGG |
| MAFA | 871 | -GCAGTGCCCCGTGA-GTTTTAGAGCTA- |
| | | CCTCGTACTAGTCTCGCATGACC- |
| | | TTTTTTTTcagccaactccaaTTTTTTTT- |
| | | GGTCATGCGAGACTAGTACGAGG |
| MAFA | 872 | g-AGGAGATTGACAGC-GTTTTAGAGCTA- |
| | | CCTCGTACTAGTCTCGCATGACC- |
| | | TTTTTTTTcagccaactccaaTTTTTTTT- |
| | | GGTCATGCGAGACTAGTACGAGG |
| MAFA | 873 | g-ACCCGGCTCTATAA-GTTTTAGAGCTA- |
| | | CCGATAGTGCTAAACGACGCTTT- |
| | | TTTTTTTTcagccaactccaaTTTTTTTT- |
| | | AAAGCGTCGTTTAGCACTATCGG |
| MAFA | 874 | g-CTCCGATTGGCCCG-GTTTTAGAGCTA- |
| | | CCGATAGTGCTAAACGACGCTTT- |
| | | TTTTTTTTcagccaactccaaTTTTTTTT- |
| | | AAAGCGTCGTTTAGCACTATCGG |
| MAFA | 875 | -GCAGTGCCCCGTGA-GTTTTAGAGCTA- |
| | | CCGATAGTGCTAAACGACGCTTT- |
| | | TTTTTTTTcagccaactccaaTTTTTTTT- |
| | | AAAGCGTCGTTTAGCACTATCGG |
| MAFA | 876 | g-AGGAGATTGACAGC-GTTTTAGAGCTA- |
| | | CCGATAGTGCTAAACGACGCTTT- |
| | | TTTTTTTTcagccaactccaaTTTTTTTT- |
| | | AAAGCGTCGTTTAGCACTATCGG |
| MAFA | 877 | g-ACCCGGCTCTATAA-GTTTTAGAGCTA- |
| | | CCCGTTATCGACGTTCAAGGAAC- |
| | | TTTTTTTTcagccaactccaaTTTTTTTT- |
| | | GTTCCTTGAACGTCGATAACGGG |
| MAFA | 878 | g-CTCCGATTGGCCCG-GTTTTAGAGCTA- |
| | | CCCGTTATCGACGTTCAAGGAAC- |
| | | TTTTTTTTcagccaactccaaTTTTTTTT- |
| | | GTTCCTTGAACGTCGATAACGGG |
| MAFA | 879 | -GCAGTGCCCCGTGA-GTTTTAGAGCTA- |
| | | CCCGTTATCGACGTTCAAGGAAC- |
| | | TTTTTTTTcagccaactccaaTTTTTTTT- |
| | | GTTCCTTGAACGTCGATAACGGG |
| MAFA | 880 | g-AGGAGATTGACAGC-GTTTTAGAGCTA- |
| | | CCCGTTATCGACGTTCAAGGAAC- |
| | | TTTTTTTTcagccaactccaaTTTTTTTT- |
| | | GTTCCTTGAACGTCGATAACGGG |
| MAFA | 881 | g-ACCCGGCTCTATAA-GTTTTAGAGCTA- |
| | | CCGATCAATGCGGTCTGCGTAAC- |
| | | TTTTTTTTcagccaactccaaTTTTTTTT- |
| | | GTTACGCAGACCGCATTGATCGG |
| MAFA | 882 | g-CTCCGATTGGCCCG-GTTTTAGAGCTA- |
| | | CCGATCAATGCGGTCTGCGTAAC- |
| | | TTTTTTTTcagccaactccaaTTTTTTTT- |
| | | GTTACGCAGACCGCATTGATCGG |
| MAFA | 883 | -GCAGTGCCCCGTGA-GTTTTAGAGCTA- |
| | | CCGATCAATGCGGTCTGCGTAAC- |
| | | TTTTTTTTcagccaactccaaTTTTTTTT- |
| | | GTTACGCAGACCGCATTGATCGG |
| MAFA | 884 | g-AGGAGATTGACAGC-GTTTTAGAGCTA- |
| | | CCGATCAATGCGGTCTGCGTAAC- |
| | | TTTTTTTTcagccaactccaaTTTTTTTT- |
| | | GTTACGCAGACCGCATTGATCGG |
| MAFA | 885 | g-ACCCGGCTCTATAA-GTTTTAGAGCTA- |
| | | CCCTTACTCGCGATACTCTCGAC- |
| | | TTTTTTTTcagccaactccaaTTTTTTTT- |
| | | GTCGAGAGTATCGCGAGTAAGGG |
| MAFA | 886 | g-CTCCGATTGGCCCG-GTTTTAGAGCTA- |
| | | CCCTTACTCGCGATACTCTCGAC- |
| | | TTTTTTTTcagccaactccaaTTTTTTTT- |
| | | GTCGAGAGTATCGCGAGTAAGGG |
| MAFA | 887 | -GCAGTGCCCCGTGA-GTTTTAGAGCTA- |
| | | CCCTTACTCGCGATACTCTCGAC- |
| | | TTTTTTTTcagccaactccaaTTTTTTTT- |
| | | GTCGAGAGTATCGCGAGTAAGGG |
| MAFA | 888 | g-AGGAGATTGACAGC-GTTTTAGAGCTA- |
| | | CCCTTACTCGCGATACTCTCGAC- |
| | | TTTTTTTTcagccaactccaaTTTTTTTT- |
| | | GTCGAGAGTATCGCGAGTAAGGG |
| MAFA | 889 | g-ACCCGGCTCTATAA-GTTTTAGAGCTA- |
| | | CCGCGGACGGTAAGCACGGAATA- |
| | | TTTTTTTTcagccaactccaaTTTTTTTT- |
| | | TATTCCGTGCTTACCGTCCGCGG |
| MAFA | 890 | g-CTCCGATTGGCCCG-GTTTTAGAGCTA- |
| | | CCGCGGACGGTAAGCACGGAATA- |
| | | TTTTTTTTcagccaactccaaTTTTTTTT- |
| | | TATTCCGTGCTTACCGTCCGCGG |
| MAFA | 891 | -GCAGTGCCCCGTGA-GTTTTAGAGCTA- |
| | | CCGCGGACGGTAAGCACGGAATA- |
| | | TTTTTTTTcagccaactccaaTTTTTTTT- |
| | | TATTCCGTGCTTACCGTCCGCGG |
| MAFA | 892 | g-AGGAGATTGACAGC-GTTTTAGAGCTA- |
| | | CCGCGGACGGTAAGCACGGAATA- |
| | | TTTTTTTTcagccaactccaaTTTTTTTT- |
| | | TATTCCGTGCTTACCGTCCGCGG |
| MAFA | 893 | g-ACCCGGCTCTATAA-GTTTTAGAGCTA- |
| | | CCTATAGTCACGAATCGTAGGGT- |
| | | TTTTTTTTcagccaactccaaTTTTTTTT- |
| | | ACCCTACGATTCGTGACTATAGG |
| MAFA | 894 | g-CTCCGATTGGCCCG-GTTTTAGAGCTA- |
| | | CCTATAGTCACGAATCGTAGGGT- |
| | | TTTTTTTTcagccaactccaaTTTTTTTT- |
| | | ACCCTACGATTCGTGACTATAGG |
| MAFA | 895 | -GCAGTGCCCCGTGA-GTTTTAGAGCTA- |
| | | CCTATAGTCACGAATCGTAGGGT- |
| | | TTTTTTTTcagccaactccaaTTTTTTTT- |
| | | ACCCTACGATTCGTGACTATAGG |
| MAFA | 896 | g-AGGAGATTGACAGC-GTTTTAGAGCTA- |
| | | CCTATAGTCACGAATCGTAGGGT- |
| | | TTTTTTTTcagccaactccaaTTTTTTTT- |
| | | ACCCTACGATTCGTGACTATAGG |
| MAFA | 897 | g-ACCCGGCTCTATAA-GTTTTAGAGCTA- |
| | | CCCGTCGTCACGTATGCGTAGCA- |
| | | TTTTTTTTcagccaactccaaTTTTTTTT- |
| | | TGCTACGCATACGTGACGACGGG |
| MAFA | 898 | g-CTCCGATTGGCCCG-GTTTTAGAGCTA- |
| | | CCCGTCGTCACGTATGCGTAGCA- |
| | | TTTTTTTTcagccaactccaaTTTTTTTT- |
| | | TGCTACGCATACGTGACGACGGG |
| MAFA | 899 | -GCAGTGCCCCGTGA-GTTTTAGAGCTA- |
| | | CCCGTCGTCACGTATGCGTAGCA- |
| | | TTTTTTTTcagccaactccaaTTTTTTTT- |
| | | TGCTACGCATACGTGACGACGGG |
| MAFA | 900 | g-AGGAGATTGACAGC-GTTTTAGAGCTA- |
| | | CCCGTCGTCACGTATGCGTAGCA- |
| | | TTTTTTTTcagccaactccaaTTTTTTTT- |
| | | TGCTACGCATACGTGACGACGGG |
| MAFA | 901 | g-ACCCGGCTCTATAA-GTTTTAGAGCTA- |
| | | CCCGAGAGGTAGTAGACGACGCA- |
| | | TTTTTTTTcagccaactccaaTTTTTTTT- |
| | | TGCGTCGTCTACTACCTCTCGGG |
| MAFA | 902 | g-CTCCGATTGGCCCG-GTTTTAGAGCTA- |
| | | CCCGAGAGGTAGTAGACGACGCA- |
| | | TTTTTTTTcagccaactccaaTTTTTTTT- |
| | | TGCGTCGTCTACTACCTCTCGGG |
| MAFA | 903 | -GCAGTGCCCCGTGA-GTTTTAGAGCTA- |
| | | CCCGAGAGGTAGTAGACGACGCA- |
| | | TTTTTTTTcagccaactccaaTTTTTTTT- |
| | | TGCGTCGTCTACTACCTCTCGGG |
| MAFA | 904 | g-AGGAGATTGACAGC-GTTTTAGAGCTA- |
| | | CCCGAGAGGTAGTAGACGACGCA- |
| | | TTTTTTTTcagccaactccaaTTTTTTTT- |
| | | TGCGTCGTCTACTACCTCTCGGG |
| MAFA | 905 | g-ACCCGGCTCTATAA-GTTTTAGAGCTA- |
| | | CCGACGTCTACGGACGGGAGCTA- |
| | | TTTTTTTTcagccaactccaaTTTTTTTT- |
| | | TAGCTCCCGTCCGTAGACGTCGG |
| MAFA | 906 | g-CTCCGATTGGCCCG-GTTTTAGAGCTA- |
| | | CCGACGTCTACGGACGGGAGCTA- |
| | | TTTTTTTTcagccaactccaaTTTTTTTT- |
| | | TAGCTCCCGTCCGTAGACGTCGG |
| MAFA | 907 | -GCAGTGCCCCGTGA-GTTTTAGAGCTA- |
| | | CCGACGTCTACGGACGGGAGCTA- |
| | | TTTTTTTTcagccaactccaaTTTTTTTT- |
| | | TAGCTCCCGTCCGTAGACGTCGG |
| MAFA | 908 | g-AGGAGATTGACAGC-GTTTTAGAGCTA- |
| | | CCGACGTCTACGGACGGGAGCTA- |
| | | TTTTTTTTcagccaactccaaTTTTTTTT- |
| | | TAGCTCCCGTCCGTAGACGTCGG |
| MAFA | 909 | g-ACCCGGCTCTATAA-GTTTTAGAGCTA- |
| | | CCAAAGCTCATTCGCGACTGAGC- |
| | | TTTTTTTTcagccaactccaaTTTTTTTT- |
| | | GCTCAGTCGCGAATGAGCTTTGG |
| MAFA | 910 | g-CTCCGATTGGCCCG-GTTTTAGAGCTA- |
| | | CCAAAGCTCATTCGCGACTGAGC- |
| | | TTTTTTTTcagccaactccaaTTTTTTTT- |
| | | GCTCAGTCGCGAATGAGCTTTGG |
| MAFA | 911 | -GCAGTGCCCCGTGA-GTTTTAGAGCTA- |
| | | CCAAAGCTCATTCGCGACTGAGC- |
| | | TTTTTTTTcagccaactccaaTTTTTTTT- |
| | | GCTCAGTCGCGAATGAGCTTTGG |
| MAFA | 912 | g-AGGAGATTGACAGC-GTTTTAGAGCTA- |
| | | CCAAAGCTCATTCGCGACTGAGC- |
| | | TTTTTTTTcagccaactccaaTTTTTTTT- |
| | | GCTCAGTCGCGAATGAGCTTTGG |
| MAFA | 913 | g-ACCCGGCTCTATAA-GTTTTAGAGCTA- |
| | | CCATGGCACGATCGACACGGAGG- |
| | | TTTTTTTTcagccaactccaaTTTTTTTT- |
| | | CCTCCGTGTCGATCGTGCCATGG |
| MAFA | 914 | g-CTCCGATTGGCCCG-GTTTTAGAGCTA- |
| | | CCATGGCACGATCGACACGGAGG- |
| | | TTTTTTTTcagccaactccaaTTTTTTTT- |
| | | CCTCCGTGTCGATCGTGCCATGG |
| MAFA | 915 | -GCAGTGCCCCGTGA-GTTTTAGAGCTA- |
| | | CCATGGCACGATCGACACGGAGG- |
| | | TTTTTTTTcagccaactccaaTTTTTTTT- |
| | | CCTCCGTGTCGATCGTGCCATGG |
| MAFA | 916 | g-AGGAGATTGACAGC-GTTTTAGAGCTA- |
| | | CCATGGCACGATCGACACGGAGG- |
| | | TTTTTTTTcagccaactccaaTTTTTTTT- |
| | | CCTCCGTGTCGATCGTGCCATGG |
| MAFA | 917 | g-ACCCGGCTCTATAA-GTTTTAGAGCTA- |
| | | CCCGAACTCTCTATCGAACGAGT- |
| | | TTTTTTTTcagccaactccaaTTTTTTTT- |
| | | ACTCGTTCGATAGAGAGTTCGGG |
| MAFA | 918 | g-CTCCGATTGGCCCG-GTTTTAGAGCTA- |
| | | CCCGAACTCTCTATCGAACGAGT- |
| | | TTTTTTTTcagccaactccaaTTTTTTTT- |
| | | ACTCGTTCGATAGAGAGTTCGGG |
| MAFA | 919 | -GCAGTGCCCCGTGA-GTTTTAGAGCTA- |
| | | CCCGAACTCTCTATCGAACGAGT- |
| | | TTTTTTTTcagccaactccaaTTTTTTTT- |
| | | ACTCGTTCGATAGAGAGTTCGGG |
| MAFA | 920 | g-AGGAGATTGACAGC-GTTTTAGAGCTA- |
| | | CCCGAACTCTCTATCGAACGAGT- |
| | | TTTTTTTTcagccaactccaaTTTTTTTT- |
| | | ACTCGTTCGATAGAGAGTTCGGG |
| NEUROD1 | 921 | g-CGTGCGCAGGCGTC-GTTTTAGAGCTA- |
| | | CCGTCGTTGTACCGTCTACTTGAC- |
| | | TTTTTTTTcagccaactccaaTTTTTTTT- |
| | | GTCAAGTAGACGGTACAACGACGG |
| NEUROD1 | 922 | g-TAGCATCACTAACT-GTTTTAGAGCTA- |
| | | CCGTCGTTGTACCGTCTACTTGAC- |
| | | TTTTTTTTcagccaactccaaTTTTTTTT- |
| | | GTCAAGTAGACGGTACAACGACGG |
| NEUROD1 | 923 | -GCGGAGTCTCTAAC-GTTTTAGAGCTA- |
| | | CCGTCGTTGTACCGTCTACTTGAC- |
| | | TTTTTTTTcagccaactccaaTTTTTTTT- |
| | | GTCAAGTAGACGGTACAACGACGG |
| NEUROD1 | 924 | -GACGAGCAAGGCGT-GTTTTAGAGCTA- |
| | | CCGTCGTTGTACCGTCTACTTGAC- |
| | | TTTTTTTTcagccaactccaaTTTTTTTT- |
| | | GTCAAGTAGACGGTACAACGACGG |
| NEUROD1 | 925 | g-CGTGCGCAGGCGTC-GTTTTAGAGCTA- |
| | | CCTACACTCGACATCGGTAGCTA- |
| | | TTTTTTTTcagccaactccaaTTTTTTTT- |
| | | TAGCTACCGATGTCGAGTGTAGG |
| NEUROD1 | 926 | g-TAGCATCACTAACT-GTTTTAGAGCTA- |
| | | CCTACACTCGACATCGGTAGCTA- |
| | | TTTTTTTTcagccaactccaaTTTTTTTT- |
| | | TAGCTACCGATGTCGAGTGTAGG |
| NEUROD1 | 927 | -GCGGAGTCTCTAAC-GTTTTAGAGCTA- |
| | | CCTACACTCGACATCGGTAGCTA- |
| | | TTTTTTTTcagccaactccaaTTTTTTTT- |
| | | TAGCTACCGATGTCGAGTGTAGG |
| NEUROD1 | 928 | -GACGAGCAAGGCGT-GTTTTAGAGCTA- |
| | | CCTACACTCGACATCGGTAGCTA- |
| | | TTTTTTTTcagccaactccaaTTTTTTTT- |
| | | TAGCTACCGATGTCGAGTGTAGG |
| NEUROD1 | 929 | g-CGTGCGCAGGCGTC-GTTTTAGAGCTA- |
| | | CCCTGGCGGAACGTTCGAGTAAT- |
| | | TTTTTTTTcagccaactccaaTTTTTTTT- |
| | | ATTACTCGAACGTTCCGCCAGGG |
| NEUROD1 | 930 | g-TAGCATCACTAACT-GTTTTAGAGCTA- |
| | | CCCTGGCGGAACGTTCGAGTAAT- |
| | | TTTTTTTTcagccaactccaaTTTTTTTT- |
| | | ATTACTCGAACGTTCCGCCAGGG |
| NEUROD1 | 931 | -GCGGAGTCTCTAAC-GTTTTAGAGCTA- |
| | | CCCTGGCGGAACGTTCGAGTAAT- |
| | | TTTTTTTTcagccaactccaaTTTTTTTT- |
| | | ATTACTCGAACGTTCCGCCAGGG |
| NEUROD1 | 932 | -GACGAGCAAGGCGT-GTTTTAGAGCTA- |
| | | CCCTGGCGGAACGTTCGAGTAAT- |
| | | TTTTTTTTcagccaactccaaTTTTTTTT- |
| | | ATTACTCGAACGTTCCGCCAGGG |
| NEUROD1 | 933 | g-CGTGCGCAGGCGTC-GTTTTAGAGCTA- |
| | | CCTACACGATAGTGGTCGTGCGC- |
| | | TTTTTTTTcagccaactccaaTTTTTTTT- |
| | | GCGCACGACCACTATCGTGTAGG |
| NEUROD1 | 934 | g-TAGCATCACTAACT-GTTTTAGAGCTA- |
| | | CCTACACGATAGTGGTCGTGCGC- |
| | | TTTTTTTTcagccaactccaaTTTTTTTT- |
| | | GCGCACGACCACTATCGTGTAGG |
| NEUROD1 | 935 | -GCGGAGTCTCTAAC-GTTTTAGAGCTA- |
| | | CCTACACGATAGTGGTCGTGCGC- |
| | | TTTTTTTTcagccaactccaaTTTTTTTT- |
| | | GCGCACGACCACTATCGTGTAGG |
| NEUROD1 | 936 | -GACGAGCAAGGCGT-GTTTTAGAGCTA- |
| | | CCTACACGATAGTGGTCGTGCGC- |
| | | TTTTTTTTcagccaactccaaTTTTTTTT- |
| | | GCGCACGACCACTATCGTGTAGG |
| NEUROD1 | 937 | g-CGTGCGCAGGCGTC-GTTTTAGAGCTA- |
| | | CCTTCCCGACTTCCGTAGGAGCGC- |
| | | TTTTTTTTcagccaactccaaTTTTTTTT- |
| | | GCGCTCCTACGGAAGTCGGGAAGG |
| NEUROD1 | 938 | g-TAGCATCACTAACT-GTTTTAGAGCTA- |
| | | CCTTCCCGACTTCCGTAGGAGCGC- |
| | | TTTTTTTTcagccaactccaaTTTTTTTT- |
| | | GCGCTCCTACGGAAGTCGGGAAGG |
| NEUROD1 | 939 | -GCGGAGTCTCTAAC-GTTTTAGAGCTA- |
| | | CCTTCCCGACTTCCGTAGGAGCGC- |
| | | TTTTTTTTcagccaactccaaTTTTTTTT- |
| | | GCGCTCCTACGGAAGTCGGGAAGG |
| NEUROD1 | 940 | -GACGAGCAAGGCGT-GTTTTAGAGCTA- |
| | | CCTTCCCGACTTCCGTAGGAGCGC- |
| | | TTTTTTTTcagccaactccaaTTTTTTTT- |
| | | GCGCTCCTACGGAAGTCGGGAAGG |
| NEUROD1 | 941 | g-CGTGCGCAGGCGTC-GTTTTAGAGCTA- |
| | | CCTGAAGGTAAAGATCGGGTCCTC- |
| | | TTTTTTTTcagccaactccaaTTTTTTTT- |
| | | GAGGACCCGATCTTTACCTTCAGG |
| NEUROD1 | 942 | g-TAGCATCACTAACT-GTTTTAGAGCTA- |
| | | CCTGAAGGTAAAGATCGGGTCCTC- |
| | | TTTTTTTTcagccaactccaaTTTTTTTT- |
| | | GAGGACCCGATCTTTACCTTCAGG |
| NEUROD1 | 943 | -GCGGAGTCTCTAAC-GTTTTAGAGCTA- |
| | | CCTGAAGGTAAAGATCGGGTCCTC- |
| | | TTTTTTTTcagccaactccaaTTTTTTTT- |
| | | GAGGACCCGATCTTTACCTTCAGG |
| NEUROD1 | 944 | -GACGAGCAAGGCGT-GTTTTAGAGCTA- |
| | | CCTGAAGGTAAAGATCGGGTCCTC- |
| | | TTTTTTTTcagccaactccaaTTTTTTTT- |
| | | GAGGACCCGATCTTTACCTTCAGG |
| NEUROD1 | 945 | g-CGTGCGCAGGCGTC-GTTTTAGAGCTA- |
| | | CCTGGTTATAGCGGACGCACTGT- |
| | | TTTTTTTTcagccaactccaaTTTTTTTT- |
| | | ACAGTGCGTCCGCTATAACCAGG |
| NEUROD1 | 946 | g-TAGCATCACTAACT-GTTTTAGAGCTA- |
| | | CCTGGTTATAGCGGACGCACTGT- |
| | | TTTTTTTTcagccaactccaaTTTTTTTT- |
| | | ACAGTGCGTCCGCTATAACCAGG |
| NEUROD1 | 947 | -GCGGAGTCTCTAAC-GTTTTAGAGCTA- |
| | | CCTGGTTATAGCGGACGCACTGT- |
| | | TTTTTTTTcagccaactccaaTTTTTTTT- |
| | | ACAGTGCGTCCGCTATAACCAGG |
| NEUROD1 | 948 | -GACGAGCAAGGCGT-GTTTTAGAGCTA- |
| | | CCTGGTTATAGCGGACGCACTGT- |
| | | TTTTTTTTcagccaactccaaTTTTTTTT- |
| | | ACAGTGCGTCCGCTATAACCAGG |
| NEUROD1 | 949 | g-CGTGCGCAGGCGTC-GTTTTAGAGCTA- |
| | | CCGCATCGTATTATCTGCGAAGC- |
| | | TTTTTTTTcagccaactccaaTTTTTTTT- |
| | | GCTTCGCAGATAATACGATGCGG |
| NEUROD1 | 950 | g-TAGCATCACTAACT-GTTTTAGAGCTA- |
| | | CCGCATCGTATTATCTGCGAAGC- |
| | | TTTTTTTTcagccaactccaaTTTTTTTT- |
| | | GCTTCGCAGATAATACGATGCGG |
| NEUROD1 | 951 | -GCGGAGTCTCTAAC-GTTTTAGAGCTA- |
| | | CCGCATCGTATTATCTGCGAAGC- |
| | | TTTTTTTTcagccaactccaaTTTTTTTT- |
| | | GCTTCGCAGATAATACGATGCGG |
| NEUROD1 | 952 | -GACGAGCAAGGCGT-GTTTTAGAGCTA- |
| | | CCGCATCGTATTATCTGCGAAGC- |
| | | TTTTTTTTcagccaactccaaTTTTTTTT- |
| | | GCTTCGCAGATAATACGATGCGG |
| NEUROD1 | 953 | g-CGTGCGCAGGCGTC-GTTTTAGAGCTA- |
| | | CCGCTAGGACGTTCAACGGAGTC- |
| | | TTTTTTTTcagccaactccaaTTTTTTTT- |
| | | GACTCCGTTGAACGTCCTAGCGG |
| NEUROD1 | 954 | g-TAGCATCACTAACT-GTTTTAGAGCTA- |
| | | CCGCTAGGACGTTCAACGGAGTC- |
| | | TTTTTTTTcagccaactccaaTTTTTTTT- |
| | | GACTCCGTTGAACGTCCTAGCGG |
| NEUROD1 | 955 | -GCGGAGTCTCTAAC-GTTTTAGAGCTA- |
| | | CCGCTAGGACGTTCAACGGAGTC- |
| | | TTTTTTTTcagccaactccaaTTTTTTTT- |
| | | GACTCCGTTGAACGTCCTAGCGG |
| NEUROD1 | 956 | -GACGAGCAAGGCGT-GTTTTAGAGCTA- |
| | | CCGCTAGGACGTTCAACGGAGTC- |
| | | TTTTTTTTcagccaactccaaTTTTTTTT- |
| | | GACTCCGTTGAACGTCCTAGCGG |
| NEUROD1 | 957 | g-CGTGCGCAGGCGTC-GTTTTAGAGCTA- |
| | | CCATAGCGGTACTATCGGCATCT- |
| | | TTTTTTTTcagccaactccaaTTTTTTTT- |
| | | AGATGCCGATAGTACCGCTATGG |
| NEUROD1 | 958 | g-TAGCATCACTAACT-GTTTTAGAGCTA- |
| | | CCATAGCGGTACTATCGGCATCT- |
| | | TTTTTTTTcagccaactccaaTTTTTTTT- |
| | | AGATGCCGATAGTACCGCTATGG |
| NEUROD1 | 959 | -GCGGAGTCTCTAAC-GTTTTAGAGCTA- |
| | | CCATAGCGGTACTATCGGCATCT- |
| | | TTTTTTTTcagccaactccaaTTTTTTTT- |
| | | AGATGCCGATAGTACCGCTATGG |
| NEUROD1 | 960 | -GACGAGCAAGGCGT-GTTTTAGAGCTA- |
| | | CCATAGCGGTACTATCGGCATCT- |
| | | TTTTTTTTcagccaactccaaTTTTTTTT- |
| | | AGATGCCGATAGTACCGCTATGG |
| NEUROD1 | 961 | g-CGTGCGCAGGCGTC-GTTTTAGAGCTA- |
| | | CCTCGTACTAGTCTCGCATGACC- |
| | | TTTTTTTTcagccaactccaaTTTTTTTT- |
| | | GGTCATGCGAGACTAGTACGAGG |
| NEUROD1 | 962 | g-TAGCATCACTAACT-GTTTTAGAGCTA- |
| | | CCTCGTACTAGTCTCGCATGACC- |
| | | TTTTTTTTcagccaactccaaTTTTTTTT- |
| | | GGTCATGCGAGACTAGTACGAGG |
| NEUROD1 | 963 | -GCGGAGTCTCTAAC-GTTTTAGAGCTA- |
| | | CCTCGTACTAGTCTCGCATGACC- |
| | | TTTTTTTTcagccaactccaaTTTTTTTT- |
| | | GGTCATGCGAGACTAGTACGAGG |
| NEUROD1 | 964 | -GACGAGCAAGGCGT-GTTTTAGAGCTA- |
| | | CCTCGTACTAGTCTCGCATGACC- |
| | | TTTTTTTTcagccaactccaaTTTTTTTT- |
| | | GGTCATGCGAGACTAGTACGAGG |
| NEUROD1 | 965 | g-CGTGCGCAGGCGTC-GTTTTAGAGCTA- |
| | | CCGATAGTGCTAAACGACGCTTT- |
| | | TTTTTTTTcagccaactccaaTTTTTTTT- |
| | | AAAGCGTCGTTTAGCACTATCGG |
| NEUROD1 | 966 | g-TAGCATCACTAACT-GTTTTAGAGCTA- |
| | | CCGATAGTGCTAAACGACGCTTT- |
| | | TTTTTTTTcagccaactccaaTTTTTTTT- |
| | | AAAGCGTCGTTTAGCACTATCGG |
| NEUROD1 | 967 | -GCGGAGTCTCTAAC-GTTTTAGAGCTA- |
| | | CCGATAGTGCTAAACGACGCTTT- |
| | | TTTTTTTTcagccaactccaaTTTTTTTT- |
| | | AAAGCGTCGTTTAGCACTATCGG |
| NEUROD1 | 968 | -GACGAGCAAGGCGT-GTTTTAGAGCTA- |
| | | CCGATAGTGCTAAACGACGCTTT- |
| | | TTTTTTTTcagccaactccaaTTTTTTTT- |
| | | AAAGCGTCGTTTAGCACTATCGG |
| NEUROD1 | 969 | g-CGTGCGCAGGCGTC-GTTTTAGAGCTA- |
| | | CCCGTTATCGACGTTCAAGGAAC- |
| | | TTTTTTTTcagccaactccaaTTTTTTTT- |
| | | GTTCCTTGAACGTCGATAACGGG |
| NEUROD1 | 970 | g-TAGCATCACTAACT-GTTTTAGAGCTA- |
| | | CCCGTTATCGACGTTCAAGGAAC- |
| | | TTTTTTTTcagccaactccaaTTTTTTTT- |
| | | GTTCCTTGAACGTCGATAACGGG |
| NEUROD1 | 971 | -GCGGAGTCTCTAAC-GTTTTAGAGCTA- |
| | | CCCGTTATCGACGTTCAAGGAAC- |
| | | TTTTTTTTcagccaactccaaTTTTTTTT- |
| | | GTTCCTTGAACGTCGATAACGGG |
| NEUROD1 | 972 | -GACGAGCAAGGCGT-GTTTTAGAGCTA- |
| | | CCCGTTATCGACGTTCAAGGAAC- |
| | | TTTTTTTTcagccaactccaaTTTTTTTT- |
| | | GTTCCTTGAACGTCGATAACGGG |
| NEUROD1 | 973 | g-CGTGCGCAGGCGTC-GTTTTAGAGCTA- |
| | | CCGATCAATGCGGTCTGCGTAAC- |
| | | TTTTTTTTcagccaactccaaTTTTTTTT- |
| | | GTTACGCAGACCGCATTGATCGG |
| NEUROD1 | 974 | g-TAGCATCACTAACT-GTTTTAGAGCTA- |
| | | CCGATCAATGCGGTCTGCGTAAC- |
| | | TTTTTTTTcagccaactccaaTTTTTTTT- |
| | | GTTACGCAGACCGCATTGATCGG |
| NEUROD1 | 975 | -GCGGAGTCTCTAAC-GTTTTAGAGCTA- |
| | | CCGATCAATGCGGTCTGCGTAAC- |
| | | TTTTTTTTcagccaactccaaTTTTTTTT- |
| | | GTTACGCAGACCGCATTGATCGG |
| NEUROD1 | 976 | -GACGAGCAAGGCGT-GTTTTAGAGCTA- |
| | | CCGATCAATGCGGTCTGCGTAAC- |
| | | TTTTTTTTcagccaactccaaTTTTTTTT- |
| | | GTTACGCAGACCGCATTGATCGG |
| NEUROD1 | 977 | g-CGTGCGCAGGCGTC-GTTTTAGAGCTA- |
| | | CCCTTACTCGCGATACTCTCGAC- |
| | | TTTTTTTTcagccaactccaaTTTTTTTT- |
| | | GTCGAGAGTATCGCGAGTAAGGG |
| NEUROD1 | 978 | g-TAGCATCACTAACT-GTTTTAGAGCTA- |
| | | CCCTTACTCGCGATACTCTCGAC- |
| | | TTTTTTTTcagccaactccaaTTTTTTTT- |
| | | GTCGAGAGTATCGCGAGTAAGGG |
| NEUROD1 | 979 | -GCGGAGTCTCTAAC-GTTTTAGAGCTA- |
| | | CCCTTACTCGCGATACTCTCGAC- |
| | | TTTTTTTTcagccaactccaaTTTTTTTT- |
| | | GTCGAGAGTATCGCGAGTAAGGG |
| NEUROD1 | 980 | -GACGAGCAAGGCGT-GTTTTAGAGCTA- |
| | | CCCTTACTCGCGATACTCTCGAC- |
| | | TTTTTTTTcagccaactccaaTTTTTTTT- |
| | | GTCGAGAGTATCGCGAGTAAGGG |
| NEUROD1 | 981 | g-CGTGCGCAGGCGTC-GTTTTAGAGCTA- |
| | | CCGCGGACGGTAAGCACGGAATA- |
| | | TTTTTTTTcagccaactccaaTTTTTTTT- |
| | | TATTCCGTGCTTACCGTCCGCGG |
| NEUROD1 | 982 | g-TAGCATCACTAACT-GTTTTAGAGCTA- |
| | | CCGCGGACGGTAAGCACGGAATA- |
| | | TTTTTTTTcagccaactccaaTTTTTTTT- |
| | | TATTCCGTGCTTACCGTCCGCGG |
| NEUROD1 | 983 | -GCGGAGTCTCTAAC-GTTTTAGAGCTA- |
| | | CCGCGGACGGTAAGCACGGAATA- |
| | | TTTTTTTTcagccaactccaaTTTTTTTT- |
| | | TATTCCGTGCTTACCGTCCGCGG |
| NEUROD1 | 984 | -GACGAGCAAGGCGT-GTTTTAGAGCTA- |
| | | CCGCGGACGGTAAGCACGGAATA- |
| | | TTTTTTTTcagccaactccaaTTTTTTTT- |
| | | TATTCCGTGCTTACCGTCCGCGG |
| NEUROD1 | 985 | g-CGTGCGCAGGCGTC-GTTTTAGAGCTA- |
| | | CCTATAGTCACGAATCGTAGGGT- |
| | | TTTTTTTTcagccaactccaaTTTTTTTT- |
| | | ACCCTACGATTCGTGACTATAGG |
| NEUROD1 | 986 | g-TAGCATCACTAACT-GTTTTAGAGCTA- |
| | | CCTATAGTCACGAATCGTAGGGT- |
| | | TTTTTTTTcagccaactccaaTTTTTTTT- |
| | | ACCCTACGATTCGTGACTATAGG |
| NEUROD1 | 987 | -GCGGAGTCTCTAAC-GTTTTAGAGCTA- |
| | | CCTATAGTCACGAATCGTAGGGT- |
| | | TTTTTTTTcagccaactccaaTTTTTTTT- |
| | | ACCCTACGATTCGTGACTATAGG |
| NEUROD1 | 988 | -GACGAGCAAGGCGT-GTTTTAGAGCTA- |
| | | CCTATAGTCACGAATCGTAGGGT- |
| | | TTTTTTTTcagccaactccaaTTTTTTTT- |
| | | ACCCTACGATTCGTGACTATAGG |
| NEUROD1 | 989 | g-CGTGCGCAGGCGTC-GTTTTAGAGCTA- |
| | | CCCGTCGTCACGTATGCGTAGCA- |
| | | TTTTTTTTcagccaactccaaTTTTTTTT- |
| | | TGCTACGCATACGTGACGACGGG |
| NEUROD1 | 990 | g-TAGCATCACTAACT-GTTTTAGAGCTA- |
| | | CCCGTCGTCACGTATGCGTAGCA- |
| | | TTTTTTTTcagccaactccaaTTTTTTTT- |
| | | TGCTACGCATACGTGACGACGGG |
| NEUROD1 | 991 | -GCGGAGTCTCTAAC-GTTTTAGAGCTA- |
| | | CCCGTCGTCACGTATGCGTAGCA- |
| | | TTTTTTTTcagccaactccaaTTTTTTTT- |
| | | TGCTACGCATACGTGACGACGGG |
| NEUROD1 | 992 | -GACGAGCAAGGCGT-GTTTTAGAGCTA- |
| | | CCCGTCGTCACGTATGCGTAGCA- |
| | | TTTTTTTTcagccaactccaaTTTTTTTT- |
| | | TGCTACGCATACGTGACGACGGG |
| NEUROD1 | 993 | g-CGTGCGCAGGCGTC-GTTTTAGAGCTA- |
| | | CCCGAGAGGTAGTAGACGACGCA- |
| | | TTTTTTTTcagccaactccaaTTTTTTTT- |
| | | TGCGTCGTCTACTACCTCTCGGG |
| NEUROD1 | 994 | g-TAGCATCACTAACT-GTTTTAGAGCTA- |
| | | CCCGAGAGGTAGTAGACGACGCA- |
| | | TTTTTTTTcagccaactccaaTTTTTTTT- |
| | | TGCGTCGTCTACTACCTCTCGGG |
| NEUROD1 | 995 | -GCGGAGTCTCTAAC-GTTTTAGAGCTA- |
| | | CCCGAGAGGTAGTAGACGACGCA- |
| | | TTTTTTTTcagccaactccaaTTTTTTTT- |
| | | TGCGTCGTCTACTACCTCTCGGG |
| NEUROD1 | 996 | -GACGAGCAAGGCGT-GTTTTAGAGCTA- |
| | | CCCGAGAGGTAGTAGACGACGCA- |
| | | TTTTTTTTcagccaactccaaTTTTTTTT- |
| | | TGCGTCGTCTACTACCTCTCGGG |
| NEUROD1 | 997 | g-CGTGCGCAGGCGTC-GTTTTAGAGCTA- |
| | | CCGACGTCTACGGACGGGAGCTA- |
| | | TTTTTTTTcagccaactccaaTTTTTTTT- |
| | | TAGCTCCCGTCCGTAGACGTCGG |
| NEUROD1 | 998 | g-TAGCATCACTAACT-GTTTTAGAGCTA- |
| | | CCGACGTCTACGGACGGGAGCTA- |
| | | TTTTTTTTcagccaactccaaTTTTTTTT- |
| | | TAGCTCCCGTCCGTAGACGTCGG |
| NEUROD1 | 999 | -GCGGAGTCTCTAAC-GTTTTAGAGCTA- |
| | | CCGACGTCTACGGACGGGAGCTA- |
| | | TTTTTTTTcagccaactccaaTTTTTTTT- |
| | | TAGCTCCCGTCCGTAGACGTCGG |
| NEUROD1 | 1000 | -GACGAGCAAGGCGT-GTTTTAGAGCTA- |
| | | CCGACGTCTACGGACGGGAGCTA- |
| | | TTTTTTTTcagccaactccaaTTTTTTTT- |
| | | TAGCTCCCGTCCGTAGACGTCGG |
| NEUROD1 | 1001 | g-CGTGCGCAGGCGTC-GTTTTAGAGCTA- |
| | | CCAAAGCTCATTCGCGACTGAGC- |
| | | TTTTTTTTcagccaactccaaTTTTTTTT- |
| | | GCTCAGTCGCGAATGAGCTTTGG |
| NEUROD1 | 1002 | g-TAGCATCACTAACT-GTTTTAGAGCTA- |
| | | CCAAAGCTCATTCGCGACTGAGC- |
| | | TTTTTTTTcagccaactccaaTTTTTTTT- |
| | | GCTCAGTCGCGAATGAGCTTTGG |
| NEUROD1 | 1003 | -GCGGAGTCTCTAAC-GTTTTAGAGCTA- |
| | | CCAAAGCTCATTCGCGACTGAGC- |
| | | TTTTTTTTcagccaactccaaTTTTTTTT- |
| | | GCTCAGTCGCGAATGAGCTTTGG |
| NEUROD1 | 1004 | -GACGAGCAAGGCGT-GTTTTAGAGCTA- |
| | | CCAAAGCTCATTCGCGACTGAGC- |
| | | TTTTTTTTcagccaactccaaTTTTTTTT- |
| | | GCTCAGTCGCGAATGAGCTTTGG |
| NEUROD1 | 1005 | g-CGTGCGCAGGCGTC-GTTTTAGAGCTA- |
| | | CCATGGCACGATCGACACGGAGG- |
| | | TTTTTTTTcagccaactccaaTTTTTTTT- |
| | | CCTCCGTGTCGATCGTGCCATGG |
| NEUROD1 | 1006 | g-TAGCATCACTAACT-GTTTTAGAGCTA- |
| | | CCATGGCACGATCGACACGGAGG- |
| | | TTTTTTTTcagccaactccaaTTTTTTTT- |
| | | CCTCCGTGTCGATCGTGCCATGG |
| NEUROD1 | 1007 | -GCGGAGTCTCTAAC-GTTTTAGAGCTA- |
| | | CCATGGCACGATCGACACGGAGG- |
| | | TTTTTTTTcagccaactccaaTTTTTTTT- |
| | | CCTCCGTGTCGATCGTGCCATGG |
| NEUROD1 | 1008 | -GACGAGCAAGGCGT-GTTTTAGAGCTA- |
| | | CCATGGCACGATCGACACGGAGG- |
| | | TTTTTTTTcagccaactccaaTTTTTTTT- |
| | | CCTCCGTGTCGATCGTGCCATGG |
| NEUROD1 | 1009 | g-CGTGCGCAGGCGTC-GTTTTAGAGCTA- |
| | | CCCGAACTCTCTATCGAACGAGT- |
| | | TTTTTTTTcagccaactccaaTTTTTTTT- |
| | | ACTCGTTCGATAGAGAGTTCGGG |
| NEUROD1 | 1010 | g-TAGCATCACTAACT-GTTTTAGAGCTA- |
| | | CCCGAACTCTCTATCGAACGAGT- |
| | | TTTTTTTTcagccaactccaaTTTTTTTT- |
| | | ACTCGTTCGATAGAGAGTTCGGG |
| NEUROD1 | 1011 | -GCGGAGTCTCTAAC-GTTTTAGAGCTA- |
| | | CCCGAACTCTCTATCGAACGAGT- |
| | | TTTTTTTTcagccaactccaaTTTTTTTT- |
| | | ACTCGTTCGATAGAGAGTTCGGG |
| NEUROD1 | 1012 | -GACGAGCAAGGCGT-GTTTTAGAGCTA- |
| | | CCCGAACTCTCTATCGAACGAGT- |
| | | TTTTTTTTcagccaactccaaTTTTTTTT- |
| | | ACTCGTTCGATAGAGAGTTCGGG |
| NEUROG3 | 1013 | g-CTCGAGGGCGGGCT-GTTTTAGAGCTA- |
| | | CCGTCGTTGTACCGTCTACTTGAC- |
| | | TTTTTTTTcagccaactccaaTTTTTTTT- |
| | | GTCAAGTAGACGGTACAACGACGG |
| NEUROG3 | 1014 | -GCCAATCAGCGCCG-GTTTTAGAGCTA- |
| | | CCGTCGTTGTACCGTCTACTTGAC- |
| | | TTTTTTTTcagccaactccaaTTTTTTTT- |
| | | GTCAAGTAGACGGTACAACGACGG |
| NEUROG3 | 1015 | g-TGGATTCCGGACAA-GTTTTAGAGCTA- |
| | | CCGTCGTTGTACCGTCTACTTGAC- |
| | | TTTTTTTTcagccaactccaaTTTTTTTT- |
| | | GTCAAGTAGACGGTACAACGACGG |
| NEUROG3 | 1016 | -GTGTGGCTCTGGTC-GTTTTAGAGCTA- |
| | | CCGTCGTTGTACCGTCTACTTGAC- |
| | | TTTTTTTTcagccaactccaaTTTTTTTT- |
| | | GTCAAGTAGACGGTACAACGACGG |
| NEUROG3 | 1017 | g-CTCGAGGGCGGGCT-GTTTTAGAGCTA- |
| | | CCTACACTCGACATCGGTAGCTA- |
| | | TTTTTTTTcagccaactccaaTTTTTTTT- |
| | | TAGCTACCGATGTCGAGTGTAGG |
| NEUROG3 | 1018 | -GCCAATCAGCGCCG-GTTTTAGAGCTA- |
| | | CCTACACTCGACATCGGTAGCTA- |
| | | TTTTTTTTcagccaactccaaTTTTTTTT- |
| | | TAGCTACCGATGTCGAGTGTAGG |
| NEUROG3 | 1019 | g-TGGATTCCGGACAA-GTTTTAGAGCTA- |
| | | CCTACACTCGACATCGGTAGCTA- |
| | | TTTTTTTTcagccaactccaaTTTTTTTT- |
| | | TAGCTACCGATGTCGAGTGTAGG |
| NEUROG3 | 1020 | -GTGTGGCTCTGGTC-GTTTTAGAGCTA- |
| | | CCTACACTCGACATCGGTAGCTA- |
| | | TTTTTTTTcagccaactccaaTTTTTTTT- |
| | | TAGCTACCGATGTCGAGTGTAGG |
| NEUROG3 | 1021 | g-CTCGAGGGCGGGCT-GTTTTAGAGCTA- |
| | | CCCTGGCGGAACGTTCGAGTAAT- |
| | | TTTTTTTTcagccaactccaaTTTTTTTT- |
| | | ATTACTCGAACGTTCCGCCAGGG |
| NEUROG3 | 1022 | -GCCAATCAGCGCCG-GTTTTAGAGCTA- |
| | | CCCTGGCGGAACGTTCGAGTAAT- |
| | | TTTTTTTTcagccaactccaaTTTTTTTT- |
| | | ATTACTCGAACGTTCCGCCAGGG |
| NEUROG3 | 1023 | g-TGGATTCCGGACAA-GTTTTAGAGCTA- |
| | | CCCTGGCGGAACGTTCGAGTAAT- |
| | | TTTTTTTTcagccaactccaaTTTTTTTT- |
| | | ATTACTCGAACGTTCCGCCAGGG |
| NEUROG3 | 1024 | -GTGTGGCTCTGGTC-GTTTTAGAGCTA- |
| | | CCCTGGCGGAACGTTCGAGTAAT- |
| | | TTTTTTTTcagccaactccaaTTTTTTTT- |
| | | ATTACTCGAACGTTCCGCCAGGG |
| NEUROG3 | 1025 | g-CTCGAGGGCGGGCT-GTTTTAGAGCTA- |
| | | CCTACACGATAGTGGTCGTGCGC- |
| | | TTTTTTTTcagccaactccaaTTTTTTTT- |
| | | GCGCACGACCACTATCGTGTAGG |
| NEUROG3 | 1026 | -GCCAATCAGCGCCG-GTTTTAGAGCTA- |
| | | CCTACACGATAGTGGTCGTGCGC- |
| | | TTTTTTTTcagccaactccaaTTTTTTTT- |
| | | GCGCACGACCACTATCGTGTAGG |
| NEUROG3 | 1027 | g-TGGATTCCGGACAA-GTTTTAGAGCTA- |
| | | CCTACACGATAGTGGTCGTGCGC- |
| | | TTTTTTTTcagccaactccaaTTTTTTTT- |
| | | GCGCACGACCACTATCGTGTAGG |
| NEUROG3 | 1028 | -GTGTGGCTCTGGTC-GTTTTAGAGCTA- |
| | | CCTACACGATAGTGGTCGTGCGC- |
| | | TTTTTTTTcagccaactccaaTTTTTTTT- |
| | | GCGCACGACCACTATCGTGTAGG |
| NEUROG3 | 1029 | g-CTCGAGGGCGGGCT-GTTTTAGAGCTA- |
| | | CCTTCCCGACTTCCGTAGGAGCGC- |
| | | TTTTTTTTcagccaactccaaTTTTTTTT- |
| | | GCGCTCCTACGGAAGTCGGGAAGG |
| NEUROG3 | 1030 | -GCCAATCAGCGCCG-GTTTTAGAGCTA- |
| | | CCTTCCCGACTTCCGTAGGAGCGC- |
| | | TTTTTTTTcagccaactccaaTTTTTTTT- |
| | | GCGCTCCTACGGAAGTCGGGAAGG |
| NEUROG3 | 1031 | g-TGGATTCCGGACAA-GTTTTAGAGCTA- |
| | | CCTTCCCGACTTCCGTAGGAGCGC- |
| | | TTTTTTTTcagccaactccaaTTTTTTTT- |
| | | GCGCTCCTACGGAAGTCGGGAAGG |
| NEUROG3 | 1032 | -GTGTGGCTCTGGTC-GTTTTAGAGCTA- |
| | | CCTTCCCGACTTCCGTAGGAGCGC- |
| | | TTTTTTTTcagccaactccaaTTTTTTTT- |
| | | GCGCTCCTACGGAAGTCGGGAAGG |
| NEUROG3 | 1033 | g-CTCGAGGGGGGCT-GTTTTAGAGCTA- |
| | | CCTGAAGGTAAAGATCGGGTCCTC- |
| | | TTTTTTTTcagccaactccaaTTTTTTTT- |
| | | GAGGACCCGATCTTTACCTTCAGG |
| NEUROG3 | 1034 | -GCCAATCAGCGCCG-GTTTTAGAGCTA- |
| | | CCTGAAGGTAAAGATCGGGTCCTC- |
| | | TTTTTTTTcagccaactccaaTTTTTTTT- |
| | | GAGGACCCGATCTTTACCTTCAGG |
| NEUROG3 | 1035 | g-TGGATTCCGGACAA-GTTTTAGAGCTA- |
| | | CCTGAAGGTAAAGATCGGGTCCTC- |
| | | TTTTTTTTcagccaactccaaTTTTTTTT- |
| | | GAGGACCCGATCTTTACCTTCAGG |
| NEUROG3 | 1036 | -GTGTGGCTCTGGTC-GTTTTAGAGCTA- |
| | | CCTGAAGGTAAAGATCGGGTCCTC- |
| | | TTTTTTTTcagccaactccaaTTTTTTTT- |
| | | GAGGACCCGATCTTTACCTTCAGG |
| NEUROG3 | 1037 | g-CTCGAGGGCGGGCT-GTTTTAGAGCTA- |
| | | CCTGGTTATAGCGGACGCACTGT- |
| | | TTTTTTTTcagccaactccaaTTTTTTTT- |
| | | ACAGTGCGTCCGCTATAACCAGG |
| NEUROG3 | 1038 | -GCCAATCAGCGCCG-GTTTTAGAGCTA- |
| | | CCTGGTTATAGCGGACGCACTGT- |
| | | TTTTTTTTcagccaactccaaTTTTTTTT- |
| | | ACAGTGCGTCCGCTATAACCAGG |
| NEUROG3 | 1039 | g-TGGATTCCGGACAA-GTTTTAGAGCTA- |
| | | CCTGGTTATAGCGGACGCACTGT- |
| | | TTTTTTTTcagccaactccaaTTTTTTTT- |
| | | ACAGTGCGTCCGCTATAACCAGG |
| NEUROG3 | 1040 | -GTGTGGCTCTGGTC-GTTTTAGAGCTA- |
| | | CCTGGTTATAGCGGACGCACTGT- |
| | | TTTTTTTTcagccaactccaaTTTTTTTT- |
| | | ACAGTGCGTCCGCTATAACCAGG |
| NEUROG3 | 1041 | g-CTCGAGGGCGGGCT-GTTTTAGAGCTA- |
| | | CCGCATCGTATTATCTGCGAAGC- |
| | | TTTTTTTTcagccaactccaaTTTTTTTT- |
| | | GCTTCGCAGATAATACGATGCGG |
| NEUROG3 | 1042 | -GCCAATCAGCGCCG-GTTTTAGAGCTA- |
| | | CCGCATCGTATTATCTGCGAAGC- |
| | | TTTTTTTTcagccaactccaaTTTTTTTT- |
| | | GCTTCGCAGATAATACGATGCGG |
| NEUROG3 | 1043 | g-TGGATTCCGGACAA-GTTTTAGAGCTA- |
| | | CCGCATCGTATTATCTGCGAAGC- |
| | | TTTTTTTTcagccaactccaaTTTTTTTT- |
| | | GCTTCGCAGATAATACGATGCGG |
| NEUROG3 | 1044 | -GTGTGGCTCTGGTC-GTTTTAGAGCTA- |
| | | CCGCATCGTATTATCTGCGAAGC- |
| | | TTTTTTTTcagccaactccaaTTTTTTTT- |
| | | GCTTCGCAGATAATACGATGCGG |
| NEUROG3 | 1045 | g-CTCGAGGGGGGCT-GTTTTAGAGCTA- |
| | | CCGCTAGGACGTTCAACGGAGTC- |
| | | TTTTTTTTcagccaactccaaTTTTTTTT- |
| | | GACTCCGTTGAACGTCCTAGCGG |
| NEUROG3 | 1046 | -GCCAATCAGCGCCG-GTTTTAGAGCTA- |
| | | CCGCTAGGACGTTCAACGGAGTC- |
| | | TTTTTTTTcagccaactccaaTTTTTTTT- |
| | | GACTCCGTTGAACGTCCTAGCGG |
| NEUROG3 | 1047 | g-TGGATTCCGGACAA-GTTTTAGAGCTA- |
| | | CCGCTAGGACGTTCAACGGAGTC- |
| | | TTTTTTTTcagccaactccaaTTTTTTTT- |
| | | GACTCCGTTGAACGTCCTAGCGG |
| NEUROG3 | 1048 | -GTGTGGCTCTGGTC-GTTTTAGAGCTA- |
| | | CCGCTAGGACGTTCAACGGAGTC- |
| | | TTTTTTTTcagccaactccaaTTTTTTTT- |
| | | GACTCCGTTGAACGTCCTAGCGG |
| NEUROG3 | 1049 | g-CTCGAGGGCGGGCT-GTTTTAGAGCTA- |
| | | CCATAGCGGTACTATCGGCATCT- |
| | | TTTTTTTTcagccaactccaaTTTTTTTT- |
| | | AGATGCCGATAGTACCGCTATGG |
| NEUROG3 | 1050 | -GCCAATCAGCGCCG-GTTTTAGAGCTA- |
| | | CCATAGCGGTACTATCGGCATCT- |
| | | TTTTTTTTcagccaactccaaTTTTTTTT- |
| | | AGATGCCGATAGTACCGCTATGG |
| NEUROG3 | 1051 | g-TGGATTCCGGACAA-GTTTTAGAGCTA- |
| | | CCATAGCGGTACTATCGGCATCT- |
| | | TTTTTTTTcagccaactccaaTTTTTTTT- |
| | | AGATGCCGATAGTACCGCTATGG |
| NEUROG3 | 1052 | -GTGTGGCTCTGGTC-GTTTTAGAGCTA- |
| | | CCATAGCGGTACTATCGGCATCT- |
| | | TTTTTTTTcagccaactccaaTTTTTTTT- |
| | | AGATGCCGATAGTACCGCTATGG |
| NEUROG3 | 1053 | g-CTCGAGGGCGGGCT-GTTTTAGAGCTA- |
| | | CCTCGTACTAGTCTCGCATGACC- |
| | | TTTTTTTTcagccaactccaaTTTTTTTT- |
| | | GGTCATGCGAGACTAGTACGAGG |
| NEUROG3 | 1054 | -GCCAATCAGCGCCG-GTTTTAGAGCTA- |
| | | CCTCGTACTAGTCTCGCATGACC- |
| | | TTTTTTTTcagccaactccaaTTTTTTTT- |
| | | GGTCATGCGAGACTAGTACGAGG |
| NEUROG3 | 1055 | g-TGGATTCCGGACAA-GTTTTAGAGCTA- |
| | | CCTCGTACTAGTCTCGCATGACC- |
| | | TTTTTTTTcagccaactccaaTTTTTTTT- |
| | | GGTCATGCGAGACTAGTACGAGG |
| NEUROG3 | 1056 | -GTGTGGCTCTGGTC-GTTTTAGAGCTA- |
| | | CCTCGTACTAGTCTCGCATGACC- |
| | | TTTTTTTTcagccaactccaaTTTTTTTT- |
| | | GGTCATGCGAGACTAGTACGAGG |
| NEUROG3 | 1057 | g-CTCGAGGGCGGGCT-GTTTTAGAGCTA- |
| | | CCGATAGTGCTAAACGACGCTTT- |
| | | TTTTTTTTcagccaactccaaTTTTTTTT- |
| | | AAAGCGTCGTTTAGCACTATCGG |
| NEUROG3 | 1058 | -GCCAATCAGCGCCG-GTTTTAGAGCTA- |
| | | CCGATAGTGCTAAACGACGCTTT- |
| | | TTTTTTTTcagccaactccaaTTTTTTTT- |
| | | AAAGCGTCGTTTAGCACTATCGG |
| NEUROG3 | 1059 | g-TGGATTCCGGACAA-GTTTTAGAGCTA- |
| | | CCGATAGTGCTAAACGACGCTTT- |
| | | TTTTTTTTcagccaactccaaTTTTTTTT- |
| | | AAAGCGTCGTTTAGCACTATCGG |
| NEUROG3 | 1060 | -GTGTGGCTCTGGTC-GTTTTAGAGCTA- |
| | | CCGATAGTGCTAAACGACGCTTT- |
| | | TTTTTTTTcagccaactccaaTTTTTTTT- |
| | | AAAGCGTCGTTTAGCACTATCGG |
| NEUROG3 | 1061 | g-CTCGAGGGCGGGCT-GTTTTAGAGCTA- |
| | | CCCGTTATCGACGTTCAAGGAAC- |
| | | TTTTTTTTcagccaactccaaTTTTTTTT- |
| | | GTTCCTTGAACGTCGATAACGGG |
| NEUROG3 | 1062 | -GCCAATCAGCGCCG-GTTTTAGAGCTA- |
| | | CCCGTTATCGACGTTCAAGGAAC- |
| | | TTTTTTTTcagccaactccaaTTTTTTTT- |
| | | GTTCCTTGAACGTCGATAACGGG |
| NEUROG3 | 1063 | g-TGGATTCCGGACAA-GTTTTAGAGCTA- |
| | | CCCGTTATCGACGTTCAAGGAAC- |
| | | TTTTTTTTcagccaactccaaTTTTTTTT- |
| | | GTTCCTTGAACGTCGATAACGGG |
| NEUROG3 | 1064 | -GTGTGGCTCTGGTC-GTTTTAGAGCTA- |
| | | CCCGTTATCGACGTTCAAGGAAC- |
| | | TTTTTTTTcagccaactccaaTTTTTTTT- |
| | | GTTCCTTGAACGTCGATAACGGG |
| NEUROG3 | 1065 | g-CTCGAGGGCGGGCT-GTTTTAGAGCTA- |
| | | CCGATCAATGCGGTCTGCGTAAC- |
| | | TTTTTTTTcagccaactccaaTTTTTTTT- |
| | | GTTACGCAGACCGCATTGATCGG |
| NEUROG3 | 1066 | -GCCAATCAGCGCCG-GTTTTAGAGCTA- |
| | | CCGATCAATGCGGTCTGCGTAAC- |
| | | TTTTTTTTcagccaactccaaTTTTTTTT- |
| | | GTTACGCAGACCGCATTGATCGG |
| NEUROG3 | 1067 | g-TGGATTCCGGACAA-GTTTTAGAGCTA- |
| | | CCGATCAATGCGGTCTGCGTAAC- |
| | | TTTTTTTTcagccaactccaaTTTTTTTT- |
| | | GTTACGCAGACCGCATTGATCGG |
| NEUROG3 | 1068 | -GTGTGGCTCTGGTC-GTTTTAGAGCTA- |
| | | CCGATCAATGCGGTCTGCGTAAC- |
| | | TTTTTTTTcagccaactccaaTTTTTTTT- |
| | | GTTACGCAGACCGCATTGATCGG |
| NEUROG3 | 1069 | g-CTCGAGGGCGGGCT-GTTTTAGAGCTA- |
| | | CCCTTACTCGCGATACTCTCGAC- |
| | | TTTTTTTTcagccaactccaaTTTTTTTT- |
| | | GTCGAGAGTATCGCGAGTAAGGG |
| NEUROG3 | 1070 | -GCCAATCAGCGCCG-GTTTTAGAGCTA- |
| | | CCCTTACTCGCGATACTCTCGAC- |
| | | TTTTTTTTcagccaactccaaTTTTTTTT- |
| | | GTCGAGAGTATCGCGAGTAAGGG |
| NEUROG3 | 1071 | g-TGGATTCCGGACAA-GTTTTAGAGCTA- |
| | | CCCTTACTCGCGATACTCTCGAC- |
| | | TTTTTTTTcagccaactccaaTTTTTTTT- |
| | | GTCGAGAGTATCGCGAGTAAGGG |
| NEUROG3 | 1072 | -GTGTGGCTCTGGTC-GTTTTAGAGCTA- |
| | | CCCTTACTCGCGATACTCTCGAC- |
| | | TTTTTTTTcagccaactccaaTTTTTTTT- |
| | | GTCGAGAGTATCGCGAGTAAGGG |
| NEUROG3 | 1073 | g-CTCGAGGGCGGGCT-GTTTTAGAGCTA- |
| | | CCGCGGACGGTAAGCACGGAATA- |
| | | TTTTTTTTcagccaactccaaTTTTTTTT- |
| | | TATTCCGTGCTTACCGTCCGCGG |
| NEUROG3 | 1074 | -GCCAATCAGCGCCG-GTTTTAGAGCTA- |
| | | CCGCGGACGGTAAGCACGGAATA- |
| | | TTTTTTTTcagccaactccaaTTTTTTTT- |
| | | TATTCCGTGCTTACCGTCCGCGG |
| NEUROG3 | 1075 | g-TGGATTCCGGACAA-GTTTTAGAGCTA- |
| | | CCGCGGACGGTAAGCACGGAATA- |
| | | TTTTTTTTcagccaactccaaTTTTTTTT- |
| | | TATTCCGTGCTTACCGTCCGCGG |
| NEUROG3 | 1076 | -GTGTGGCTCTGGTC-GTTTTAGAGCTA- |
| | | CCGCGGACGGTAAGCACGGAATA- |
| | | TTTTTTTTcagccaactccaaTTTTTTTT- |
| | | TATTCCGTGCTTACCGTCCGCGG |
| NEUROG3 | 1077 | g-CTCGAGGGCGGGCT-GTTTTAGAGCTA- |
| | | CCTATAGTCACGAATCGTAGGGT- |
| | | TTTTTTTTcagccaactccaaTTTTTTTT- |
| | | ACCCTACGATTCGTGACTATAGG |
| NEUROG3 | 1078 | -GCCAATCAGCGCCG-GTTTTAGAGCTA- |
| | | CCTATAGTCACGAATCGTAGGGT- |
| | | TTTTTTTTcagccaactccaaTTTTTTTT- |
| | | ACCCTACGATTCGTGACTATAGG |
| NEUROG3 | 1079 | g-TGGATTCCGGACAA-GTTTTAGAGCTA- |
| | | CCTATAGTCACGAATCGTAGGGT- |
| | | TTTTTTTTcagccaactccaaTTTTTTTT- |
| | | ACCCTACGATTCGTGACTATAGG |
| NEUROG3 | 1080 | -GTGTGGCTCTGGTC-GTTTTAGAGCTA- |
| | | CCTATAGTCACGAATCGTAGGGT- |
| | | TTTTTTTTcagccaactccaaTTTTTTTT- |
| | | ACCCTACGATTCGTGACTATAGG |
| NEUROG3 | 1081 | g-CTCGAGGGCGGGCT-GTTTTAGAGCTA- |
| | | CCCGTCGTCACGTATGCGTAGCA- |
| | | TTTTTTTTcagccaactccaaTTTTTTTT- |
| | | TGCTACGCATACGTGACGACGGG |
| NEUROG3 | 1082 | -GCCAATCAGCGCCG-GTTTTAGAGCTA- |
| | | CCCGTCGTCACGTATGCGTAGCA- |
| | | TTTTTTTTcagccaactccaaTTTTTTTT- |
| | | TGCTACGCATACGTGACGACGGG |
| NEUROG3 | 1083 | g-TGGATTCCGGACAA-GTTTTAGAGCTA- |
| | | CCCGTCGTCACGTATGCGTAGCA- |
| | | TTTTTTTTcagccaactccaaTTTTTTTT- |
| | | TGCTACGCATACGTGACGACGGG |
| NEUROG3 | 1084 | -GTGTGGCTCTGGTC-GTTTTAGAGCTA- |
| | | CCCGTCGTCACGTATGCGTAGCA- |
| | | TTTTTTTTcagccaactccaaTTTTTTTT- |
| | | TGCTACGCATACGTGACGACGGG |
| NEUROG3 | 1085 | g-CTCGAGGGCGGGCT-GTTTTAGAGCTA- |
| | | CCCGAGAGGTAGTAGACGACGCA- |
| | | TTTTTTTTcagccaactccaaTTTTTTTT- |
| | | TGCGTCGTCTACTACCTCTCGGG |
| NEUROG3 | 1086 | -GCCAATCAGCGCCG-GTTTTAGAGCTA- |
| | | CCCGAGAGGTAGTAGACGACGCA- |
| | | TTTTTTTTcagccaactccaaTTTTTTTT- |
| | | TGCGTCGTCTACTACCTCTCGGG |
| NEUROG3 | 1087 | g-TGGATTCCGGACAA-GTTTTAGAGCTA- |
| | | CCCGAGAGGTAGTAGACGACGCA- |
| | | TTTTTTTTcagccaactccaaTTTTTTTT- |
| | | TGCGTCGTCTACTACCTCTCGGG |
| NEUROG3 | 1088 | -GTGTGGCTCTGGTC-GTTTTAGAGCTA- |
| | | CCCGAGAGGTAGTAGACGACGCA- |
| | | TTTTTTTTcagccaactccaaTTTTTTTT- |
| | | TGCGTCGTCTACTACCTCTCGGG |
| NEUROG3 | 1089 | g-CTCGAGGGCGGGCT-GTTTTAGAGCTA- |
| | | CCGACGTCTACGGACGGGAGCTA- |
| | | TTTTTTTTcagccaactccaaTTTTTTTT- |
| | | TAGCTCCCGTCCGTAGACGTCGG |
| NEUROG3 | 1090 | -GCCAATCAGCGCCG-GTTTTAGAGCTA- |
| | | CCGACGTCTACGGACGGGAGCTA- |
| | | TTTTTTTTcagccaactccaaTTTTTTTT- |
| | | TAGCTCCCGTCCGTAGACGTCGG |
| NEUROG3 | 1091 | g-TGGATTCCGGACAA-GTTTTAGAGCTA- |
| | | CCGACGTCTACGGACGGGAGCTA- |
| | | TTTTTTTTcagccaactccaaTTTTTTTT- |
| | | TAGCTCCCGTCCGTAGACGTCGG |
| NEUROG3 | 1092 | -GTGTGGCTCTGGTC-GTTTTAGAGCTA- |
| | | CCGACGTCTACGGACGGGAGCTA- |
| | | TTTTTTTTcagccaactccaaTTTTTTTT- |
| | | TAGCTCCCGTCCGTAGACGTCGG |
| NEUROG3 | 1093 | g-CTCGAGGGCGGGCT-GTTTTAGAGCTA- |
| | | CCAAAGCTCATTCGCGACTGAGC- |
| | | TTTTTTTTcagccaactccaaTTTTTTTT- |
| | | GCTCAGTCGCGAATGAGCTTTGG |
| NEUROG3 | 1094 | -GCCAATCAGCGCCG-GTTTTAGAGCTA- |
| | | CCAAAGCTCATTCGCGACTGAGC- |
| | | TTTTTTTTcagccaactccaaTTTTTTTT- |
| | | GCTCAGTCGCGAATGAGCTTTGG |
| NEUROG3 | 1095 | g-TGGATTCCGGACAA-GTTTTAGAGCTA- |
| | | CCAAAGCTCATTCGCGACTGAGC- |
| | | TTTTTTTTcagccaactccaaTTTTTTTT- |
| | | GCTCAGTCGCGAATGAGCTTTGG |
| NEUROG3 | 1096 | -GTGTGGCTCTGGTC-GTTTTAGAGCTA- |
| | | CCAAAGCTCATTCGCGACTGAGC- |
| | | TTTTTTTTcagccaactccaaTTTTTTTT- |
| | | GCTCAGTCGCGAATGAGCTTTGG |
| NEUROG3 | 1097 | g-CTCGAGGGCGGGCT-GTTTTAGAGCTA- |
| | | CCATGGCACGATCGACACGGAGG- |
| | | TTTTTTTTcagccaactccaaTTTTTTTT- |
| | | CCTCCGTGTCGATCGTGCCATGG |
| NEUROG3 | 1098 | -GCCAATCAGCGCCG-GTTTTAGAGCTA- |
| | | CCATGGCACGATCGACACGGAGG- |
| | | TTTTTTTTcagccaactccaaTTTTTTTT- |
| | | CCTCCGTGTCGATCGTGCCATGG |
| NEUROG3 | 1099 | g-TGGATTCCGGACAA-GTTTTAGAGCTA- |
| | | CCATGGCACGATCGACACGGAGG- |
| | | TTTTTTTTcagccaactccaaTTTTTTTT- |
| | | CCTCCGTGTCGATCGTGCCATGG |
| NEUROG3 | 1100 | -GTGTGGCTCTGGTC-GTTTTAGAGCTA- |
| | | CCATGGCACGATCGACACGGAGG- |
| | | TTTTTTTTcagccaactccaaTTTTTTTT- |
| | | CCTCCGTGTCGATCGTGCCATGG |
| NEUROG3 | 1101 | g-CTCGAGGGCGGGCT-GTTTTAGAGCTA- |
| | | CCCGAACTCTCTATCGAACGAGT- |
| | | TTTTTTTTcagccaactccaaTTTTTTTT- |
| | | ACTCGTTCGATAGAGAGTTCGGG |
| NEUROG3 | 1102 | -GCCAATCAGCGCCG-GTTTTAGAGCTA- |
| | | CCCGAACTCTCTATCGAACGAGT- |
| | | TTTTTTTTcagccaactccaaTTTTTTTT- |
| | | ACTCGTTCGATAGAGAGTTCGGG |
| NEUROG3 | 1103 | g-TGGATTCCGGACAA-GTTTTAGAGCTA- |
| | | CCCGAACTCTCTATCGAACGAGT- |
| | | TTTTTTTTcagccaactccaaTTTTTTTT- |
| | | ACTCGTTCGATAGAGAGTTCGGG |
| NEUROG3 | 1104 | -GTGTGGCTCTGGTC-GTTTTAGAGCTA- |
| | | CCCGAACTCTCTATCGAACGAGT- |
| | | TTTTTTTTcagccaactccaaTTTTTTTT- |
| | | ACTCGTTCGATAGAGAGTTCGGG |
| NKX2-2 | 1105 | -GATCGCTCGGGCAA-GTTTTAGAGCTA- |
| | | CCGTCGTTGTACCGTCTACTTGAC- |
| | | TTTTTTTTcagccaactccaaTTTTTTTT- |
| | | GTCAAGTAGACGGTACAACGACGG |
| NKX2-2 | 1106 | -GACCCGCCCACACG-GTTTTAGAGCTA- |
| | | CCGTCGTTGTACCGTCTACTTGAC- |
| | | TTTTTTTTcagccaactccaaTTTTTTTT- |
| | | GTCAAGTAGACGGTACAACGACGG |
| NKX2-2 | 1107 | g-AACCTGGGGAGGCG-GTTTTAGAGCTA- |
| | | CCGTCGTTGTACCGTCTACTTGAC- |
| | | TTTTTTTTcagccaactccaaTTTTTTTT- |
| | | GTCAAGTAGACGGTACAACGACGG |
| NKX2-2 | 1108 | -GTTGGCTGGGAGCG-GTTTTAGAGCTA- |
| | | CCGTCGTTGTACCGTCTACTTGAC- |
| | | TTTTTTTTcagccaactccaaTTTTTTTT- |
| | | GTCAAGTAGACGGTACAACGACGG |
| NKX2-2 | 1109 | -GATCGCTCGGGCAA-GTTTTAGAGCTA- |
| | | CCTACACTCGACATCGGTAGCTA- |
| | | TTTTTTTTcagccaactccaaTTTTTTTT- |
| | | TAGCTACCGATGTCGAGTGTAGG |
| NKX2-2 | 1110 | -GACCCGCCCACACG-GTTTTAGAGCTA- |
| | | CCTACACTCGACATCGGTAGCTA- |
| | | TTTTTTTTcagccaactccaaTTTTTTTT- |
| | | TAGCTACCGATGTCGAGTGTAGG |
| NKX2-2 | 1111 | g-AACCTGGGGAGGCG-GTTTTAGAGCTA- |
| | | CCTACACTCGACATCGGTAGCTA- |
| | | TTTTTTTTcagccaactccaaTTTTTTTT- |
| | | TAGCTACCGATGTCGAGTGTAGG |
| NKX2-2 | 1112 | -GTTGGCTGGGAGCG-GTTTTAGAGCTA- |
| | | CCTACACTCGACATCGGTAGCTA- |
| | | TTTTTTTTcagccaactccaaTTTTTTTT- |
| | | TAGCTACCGATGTCGAGTGTAGG |
| NKX2-2 | 1113 | -GATCGCTCGGGCAA-GTTTTAGAGCTA- |
| | | CCCTGGCGGAACGTTCGAGTAAT- |
| | | TTTTTTTTcagccaactccaaTTTTTTTT- |
| | | ATTACTCGAACGTTCCGCCAGGG |
| NKX2-2 | 1114 | -GACCCGCCCACACG-GTTTTAGAGCTA- |
| | | CCCTGGCGGAACGTTCGAGTAAT- |
| | | TTTTTTTTcagccaactccaaTTTTTTTT- |
| | | ATTACTCGAACGTTCCGCCAGGG |
| NKX2-2 | 1115 | g-AACCTGGGGAGGCG-GTTTTAGAGCTA- |
| | | CCCTGGCGGAACGTTCGAGTAAT- |
| | | TTTTTTTTcagccaactccaaTTTTTTTT- |
| | | ATTACTCGAACGTTCCGCCAGGG |
| NKX2-2 | 1116 | -GTTGGCTGGGAGCG-GTTTTAGAGCTA- |
| | | CCCTGGCGGAACGTTCGAGTAAT- |
| | | TTTTTTTTcagccaactccaaTTTTTTTT- |
| | | ATTACTCGAACGTTCCGCCAGGG |
| NKX2-2 | 1117 | -GATCGCTCGGGCAA-GTTTTAGAGCTA- |
| | | CCTACACGATAGTGGTCGTGCGC- |
| | | TTTTTTTTcagccaactccaaTTTTTTTT- |
| | | GCGCACGACCACTATCGTGTAGG |
| NKX2-2 | 1118 | -GACCCGCCCACACG-GTTTTAGAGCTA- |
| | | CCTACACGATAGTGGTCGTGCGC- |
| | | TTTTTTTTcagccaactccaaTTTTTTTT- |
| | | GCGCACGACCACTATCGTGTAGG |
| NKX2-2 | 1119 | g-AACCTGGGGAGGCG-GTTTTAGAGCTA- |
| | | CCTACACGATAGTGGTCGTGCGC- |
| | | TTTTTTTTcagccaactccaaTTTTTTTT- |
| | | GCGCACGACCACTATCGTGTAGG |
| NKX2-2 | 1120 | -GTTGGCTGGGAGCG-GTTTTAGAGCTA- |
| | | CCTACACGATAGTGGTCGTGCGC- |
| | | TTTTTTTTcagccaactccaaTTTTTTTT- |
| | | GCGCACGACCACTATCGTGTAGG |
| NKX2-2 | 1121 | -GATCGCTCGGGCAA-GTTTTAGAGCTA- |
| | | CCTTCCCGACTTCCGTAGGAGCGC- |
| | | TTTTTTTTcagccaactccaaTTTTTTTT- |
| | | GCGCTCCTACGGAAGTCGGGAAGG |
| NKX2-2 | 1122 | -GACCCGCCCACACG-GTTTTAGAGCTA- |
| | | CCTTCCCGACTTCCGTAGGAGCGC- |
| | | TTTTTTTTcagccaactccaaTTTTTTTT- |
| | | GCGCTCCTACGGAAGTCGGGAAGG |
| NKX2-2 | 1123 | g-AACCTGGGGAGGCG-GTTTTAGAGCTA- |
| | | CCTTCCCGACTTCCGTAGGAGCGC- |
| | | TTTTTTTTcagccaactccaaTTTTTTTT- |
| | | GCGCTCCTACGGAAGTCGGGAAGG |
| NKX2-2 | 1124 | -GTTGGCTGGGAGCG-GTTTTAGAGCTA- |
| | | CCTTCCCGACTTCCGTAGGAGCGC- |
| | | TTTTTTTTcagccaactccaaTTTTTTTT- |
| | | GCGCTCCTACGGAAGTCGGGAAGG |
| NKX2-2 | 1125 | -GATCGCTCGGGCAA-GTTTTAGAGCTA- |
| | | CCTGAAGGTAAAGATCGGGTCCTC- |
| | | TTTTTTTTcagccaactccaaTTTTTTTT- |
| | | GAGGACCCGATCTTTACCTTCAGG |
| NKX2-2 | 1126 | -GACCCGCCCACACG-GTTTTAGAGCTA- |
| | | CCTGAAGGTAAAGATCGGGTCCTC- |
| | | TTTTTTTTcagccaactccaaTTTTTTTT- |
| | | GAGGACCCGATCTTTACCTTCAGG |
| NKX2-2 | 1127 | g-AACCTGGGGAGGCG-GTTTTAGAGCTA- |
| | | CCTGAAGGTAAAGATCGGGTCCTC- |
| | | TTTTTTTTcagccaactccaaTTTTTTTT- |
| | | GAGGACCCGATCTTTACCTTCAGG |
| NKX2-2 | 1128 | -GTTGGCTGGGAGCG-GTTTTAGAGCTA- |
| | | CCTGAAGGTAAAGATCGGGTCCTC- |
| | | TTTTTTTTcagccaactccaaTTTTTTTT- |
| | | GAGGACCCGATCTTTACCTTCAGG |
| NKX2-2 | 1129 | -GATCGCTCGGGCAA-GTTTTAGAGCTA- |
| | | CCTGGTTATAGCGGACGCACTGT- |
| | | TTTTTTTTcagccaactccaaTTTTTTTT- |
| | | ACAGTGCGTCCGCTATAACCAGG |
| NKX2-2 | 1130 | -GACCCGCCCACACG-GTTTTAGAGCTA- |
| | | CCTGGTTATAGCGGACGCACTGT- |
| | | TTTTTTTTcagccaactccaaTTTTTTTT- |
| | | ACAGTGCGTCCGCTATAACCAGG |
| NKX2-2 | 1131 | g-AACCTGGGGAGGCG-GTTTTAGAGCTA- |
| | | CCTGGTTATAGCGGACGCACTGT- |
| | | TTTTTTTTcagccaactccaaTTTTTTTT- |
| | | ACAGTGCGTCCGCTATAACCAGG |
| NKX2-2 | 1132 | -GTTGGCTGGGAGCG-GTTTTAGAGCTA- |
| | | CCTGGTTATAGCGGACGCACTGT- |
| | | TTTTTTTTcagccaactccaaTTTTTTTT- |
| | | ACAGTGCGTCCGCTATAACCAGG |
| NKX2-2 | 1133 | -GATCGCTCGGGCAA-GTTTTAGAGCTA- |
| | | CCGCATCGTATTATCTGCGAAGC- |
| | | TTTTTTTTcagccaactccaaTTTTTTTT- |
| | | GCTTCGCAGATAATACGATGCGG |
| NKX2-2 | 1134 | -GACCCGCCCACACG-GTTTTAGAGCTA- |
| | | CCGCATCGTATTATCTGCGAAGC- |
| | | TTTTTTTTcagccaactccaaTTTTTTTT- |
| | | GCTTCGCAGATAATACGATGCGG |
| NKX2-2 | 1135 | g-AACCTGGGGAGGCG-GTTTTAGAGCTA- |
| | | CCGCATCGTATTATCTGCGAAGC- |
| | | TTTTTTTTcagccaactccaaTTTTTTTT- |
| | | GCTTCGCAGATAATACGATGCGG |
| NKX2-2 | 1136 | -GTTGGCTGGGAGCG-GTTTTAGAGCTA- |
| | | CCGCATCGTATTATCTGCGAAGC- |
| | | TTTTTTTTcagccaactccaaTTTTTTTT- |
| | | GCTTCGCAGATAATACGATGCGG |
| NKX2-2 | 1137 | -GATCGCTCGGGCAA-GTTTTAGAGCTA- |
| | | CCGCTAGGACGTTCAACGGAGTC- |
| | | TTTTTTTTcagccaactccaaTTTTTTTT- |
| | | GACTCCGTTGAACGTCCTAGCGG |
| NKX2-2 | 1138 | -GACCCGCCCACACG-GTTTTAGAGCTA- |
| | | CCGCTAGGACGTTCAACGGAGTC- |
| | | TTTTTTTTcagccaactccaaTTTTTTTT- |
| | | GACTCCGTTGAACGTCCTAGCGG |
| NKX2-2 | 1139 | g-AACCTGGGGAGGCG-GTTTTAGAGCTA- |
| | | CCGCTAGGACGTTCAACGGAGTC- |
| | | TTTTTTTTcagccaactccaaTTTTTTTT- |
| | | GACTCCGTTGAACGTCCTAGCGG |
| NKX2-2 | 1140 | -GTTGGCTGGGAGCG-GTTTTAGAGCTA- |
| | | CCGCTAGGACGTTCAACGGAGTC- |
| | | TTTTTTTTcagccaactccaaTTTTTTTT- |
| | | GACTCCGTTGAACGTCCTAGCGG |
| NKX2-2 | 1141 | -GATCGCTCGGGCAA-GTTTTAGAGCTA- |
| | | CCATAGCGGTACTATCGGCATCT- |
| | | TTTTTTTTcagccaactccaaTTTTTTTT- |
| | | AGATGCCGATAGTACCGCTATGG |
| NKX2-2 | 1142 | -GACCCGCCCACACG-GTTTTAGAGCTA- |
| | | CCATAGCGGTACTATCGGCATCT- |
| | | TTTTTTTTcagccaactccaaTTTTTTTT- |
| | | AGATGCCGATAGTACCGCTATGG |
| NKX2-2 | 1143 | g-AACCTGGGGAGGCG-GTTTTAGAGCTA- |
| | | CCATAGCGGTACTATCGGCATCT- |
| | | TTTTTTTTcagccaactccaaTTTTTTTT- |
| | | AGATGCCGATAGTACCGCTATGG |
| NKX2-2 | 1144 | -GTTGGCTGGGAGCG-GTTTTAGAGCTA- |
| | | CCATAGCGGTACTATCGGCATCT- |
| | | TTTTTTTTcagccaactccaaTTTTTTTT- |
| | | AGATGCCGATAGTACCGCTATGG |
| NKX2-2 | 1145 | -GATCGCTCGGGCAA-GTTTTAGAGCTA- |
| | | CCTCGTACTAGTCTCGCATGACC- |
| | | TTTTTTTTcagccaactccaaTTTTTTTT- |
| | | GGTCATGCGAGACTAGTACGAGG |
| NKX2-2 | 1146 | -GACCCGCCCACACG-GTTTTAGAGCTA- |
| | | CCTCGTACTAGTCTCGCATGACC- |
| | | TTTTTTTTcagccaactccaaTTTTTTTT- |
| | | GGTCATGCGAGACTAGTACGAGG |
| NKX2-2 | 1147 | g-AACCTGGGGAGGCG-GTTTTAGAGCTA- |
| | | CCTCGTACTAGTCTCGCATGACC- |
| | | TTTTTTTTcagccaactccaaTTTTTTTT- |
| | | GGTCATGCGAGACTAGTACGAGG |
| NKX2-2 | 1148 | -GTTGGCTGGGAGCG-GTTTTAGAGCTA- |
| | | CCTCGTACTAGTCTCGCATGACC- |
| | | TTTTTTTTcagccaactccaaTTTTTTTT- |
| | | GGTCATGCGAGACTAGTACGAGG |
| NKX2-2 | 1149 | -GATCGCTCGGGCAA-GTTTTAGAGCTA- |
| | | CCGATAGTGCTAAACGACGCTTT- |
| | | TTTTTTTTcagccaactccaaTTTTTTTT- |
| | | AAAGCGTCGTTTAGCACTATCGG |
| NKX2-2 | 1150 | -GACCCGCCCACACG-GTTTTAGAGCTA- |
| | | CCGATAGTGCTAAACGACGCTTT- |
| | | TTTTTTTTcagccaactccaaTTTTTTTT- |
| | | AAAGCGTCGTTTAGCACTATCGG |
| NKX2-2 | 1151 | g-AACCTGGGGAGGCG-GTTTTAGAGCTA- |
| | | CCGATAGTGCTAAACGACGCTTT- |
| | | TTTTTTTTcagccaactccaaTTTTTTTT- |
| | | AAAGCGTCGTTTAGCACTATCGG |
| NKX2-2 | 1152 | -GTTGGCTGGGAGCG-GTTTTAGAGCTA- |
| | | CCGATAGTGCTAAACGACGCTTT- |
| | | TTTTTTTTcagccaactccaaTTTTTTTT- |
| | | AAAGCGTCGTTTAGCACTATCGG |
| NKX2-2 | 1153 | -GATCGCTCGGGCAA-GTTTTAGAGCTA- |
| | | CCCGTTATCGACGTTCAAGGAAC- |
| | | TTTTTTTTcagccaactccaaTTTTTTTT- |
| | | GTTCCTTGAACGTCGATAACGGG |
| NKX2-2 | 1154 | -GACCCGCCCACACG-GTTTTAGAGCTA- |
| | | CCCGTTATCGACGTTCAAGGAAC- |
| | | TTTTTTTTcagccaactccaaTTTTTTTT- |
| | | GTTCCTTGAACGTCGATAACGGG |
| NKX2-2 | 1155 | g-AACCTGGGGAGGCG-GTTTTAGAGCTA- |
| | | CCCGTTATCGACGTTCAAGGAAC- |
| | | TTTTTTTTcagccaactccaaTTTTTTTT- |
| | | GTTCCTTGAACGTCGATAACGGG |
| NKX2-2 | 1156 | -GTTGGCTGGGAGCG-GTTTTAGAGCTA- |
| | | CCCGTTATCGACGTTCAAGGAAC- |
| | | TTTTTTTTcagccaactccaaTTTTTTTT- |
| | | GTTCCTTGAACGTCGATAACGGG |
| NKX2-2 | 1157 | -GATCGCTCGGGCAA-GTTTTAGAGCTA- |
| | | CCGATCAATGCGGTCTGCGTAAC- |
| | | TTTTTTTTcagccaactccaaTTTTTTTT- |
| | | GTTACGCAGACCGCATTGATCGG |
| NKX2-2 | 1158 | -GACCCGCCCACACG-GTTTTAGAGCTA- |
| | | CCGATCAATGCGGTCTGCGTAAC- |
| | | TTTTTTTTcagccaactccaaTTTTTTTT- |
| | | GTTACGCAGACCGCATTGATCGG |
| NKX2-2 | 1159 | g-AACCTGGGGAGGCG-GTTTTAGAGCTA- |
| | | CCGATCAATGCGGTCTGCGTAAC- |
| | | TTTTTTTTcagccaactccaaTTTTTTTT- |
| | | GTTACGCAGACCGCATTGATCGG |
| NKX2-2 | 1160 | -GTTGGCTGGGAGCG-GTTTTAGAGCTA- |
| | | CCGATCAATGCGGTCTGCGTAAC- |
| | | TTTTTTTTcagccaactccaaTTTTTTTT- |
| | | GTTACGCAGACCGCATTGATCGG |
| NKX2-2 | 1161 | -GATCGCTCGGGCAA-GTTTTAGAGCTA- |
| | | CCCTTACTCGCGATACTCTCGAC- |
| | | TTTTTTTTcagccaactccaaTTTTTTTT- |
| | | GTCGAGAGTATCGCGAGTAAGGG |
| NKX2-2 | 1162 | -GACCCGCCCACACG-GTTTTAGAGCTA- |
| | | CCCTTACTCGCGATACTCTCGAC- |
| | | TTTTTTTTcagccaactccaaTTTTTTTT- |
| | | GTCGAGAGTATCGCGAGTAAGGG |
| NKX2-2 | 1163 | g-AACCTGGGGAGGCG-GTTTTAGAGCTA- |
| | | CCCTTACTCGCGATACTCTCGAC- |
| | | TTTTTTTTcagccaactccaaTTTTTTTT- |
| | | GTCGAGAGTATCGCGAGTAAGGG |
| NKX2-2 | 1164 | -GTTGGCTGGGAGCG-GTTTTAGAGCTA- |
| | | CCCTTACTCGCGATACTCTCGAC- |
| | | TTTTTTTTcagccaactccaaTTTTTTTT- |
| | | GTCGAGAGTATCGCGAGTAAGGG |
| NKX2-2 | 1165 | -GATCGCTCGGGCAA-GTTTTAGAGCTA- |
| | | CCGCGGACGGTAAGCACGGAATA- |
| | | TTTTTTTTcagccaactccaaTTTTTTTT- |
| | | TATTCCGTGCTTACCGTCCGCGG |
| NKX2-2 | 1166 | -GACCCGCCCACACG-GTTTTAGAGCTA- |
| | | CCGCGGACGGTAAGCACGGAATA- |
| | | TTTTTTTTcagccaactccaaTTTTTTTT- |
| | | TATTCCGTGCTTACCGTCCGCGG |
| NKX2-2 | 1167 | g-AACCTGGGGAGGCG-GTTTTAGAGCTA- |
| | | CCGCGGACGGTAAGCACGGAATA- |
| | | TTTTTTTTcagccaactccaaTTTTTTTT- |
| | | TATTCCGTGCTTACCGTCCGCGG |
| NKX2-2 | 1168 | -GTTGGCTGGGAGCG-GTTTTAGAGCTA- |
| | | CCGCGGACGGTAAGCACGGAATA- |
| | | TTTTTTTTcagccaactccaaTTTTTTTT- |
| | | TATTCCGTGCTTACCGTCCGCGG |
| NKX2-2 | 1169 | -GATCGCTCGGGCAA-GTTTTAGAGCTA- |
| | | CCTATAGTCACGAATCGTAGGGT- |
| | | TTTTTTTTcagccaactccaaTTTTTTTT- |
| | | ACCCTACGATTCGTGACTATAGG |
| NKX2-2 | 1170 | -GACCCGCCCACACG-GTTTTAGAGCTA- |
| | | CCTATAGTCACGAATCGTAGGGT- |
| | | TTTTTTTTcagccaactccaaTTTTTTTT- |
| | | ACCCTACGATTCGTGACTATAGG |
| NKX2-2 | 1171 | g-AACCTGGGGAGGCG-GTTTTAGAGCTA- |
| | | CCTATAGTCACGAATCGTAGGGT- |
| | | TTTTTTTTcagccaactccaaTTTTTTTT- |
| | | ACCCTACGATTCGTGACTATAGG |
| NKX2-2 | 1172 | -GTTGGCTGGGAGCG-GTTTTAGAGCTA- |
| | | CCTATAGTCACGAATCGTAGGGT- |
| | | TTTTTTTTcagccaactccaaTTTTTTTT- |
| | | ACCCTACGATTCGTGACTATAGG |
| NKX2-2 | 1173 | -GATCGCTCGGGCAA-GTTTTAGAGCTA- |
| | | CCCGTCGTCACGTATGCGTAGCA- |
| | | TTTTTTTTcagccaactccaaTTTTTTTT- |
| | | TGCTACGCATACGTGACGACGGG |
| NKX2-2 | 1174 | -GACCCGCCCACACG-GTTTTAGAGCTA- |
| | | CCCGTCGTCACGTATGCGTAGCA- |
| | | TTTTTTTTcagccaactccaaTTTTTTTT- |
| | | TGCTACGCATACGTGACGACGGG |
| NKX2-2 | 1175 | g-AACCTGGGGAGGCG-GTTTTAGAGCTA- |
| | | CCCGTCGTCACGTATGCGTAGCA- |
| | | TTTTTTTTcagccaactccaaTTTTTTTT- |
| | | TGCTACGCATACGTGACGACGGG |
| NKX2-2 | 1176 | -GTTGGCTGGGAGCG-GTTTTAGAGCTA- |
| | | CCCGTCGTCACGTATGCGTAGCA- |
| | | TTTTTTTTcagccaactccaaTTTTTTTT- |
| | | TGCTACGCATACGTGACGACGGG |
| NKX2-2 | 1177 | -GATCGCTCGGGCAA-GTTTTAGAGCTA- |
| | | CCCGAGAGGTAGTAGACGACGCA- |
| | | TTTTTTTTcagccaactccaaTTTTTTTT- |
| | | TGCGTCGTCTACTACCTCTCGGG |
| NKX2-2 | 1178 | -GACCCGCCCACACG-GTTTTAGAGCTA- |
| | | CCCGAGAGGTAGTAGACGACGCA- |
| | | TTTTTTTTcagccaactccaaTTTTTTTT- |
| | | TGCGTCGTCTACTACCTCTCGGG |
| NKX2-2 | 1179 | g-AACCTGGGGAGGCG-GTTTTAGAGCTA- |
| | | CCCGAGAGGTAGTAGACGACGCA- |
| | | TTTTTTTTcagccaactccaaTTTTTTTT- |
| | | TGCGTCGTCTACTACCTCTCGGG |
| NKX2-2 | 1180 | -GTTGGCTGGGAGCG-GTTTTAGAGCTA- |
| | | CCCGAGAGGTAGTAGACGACGCA- |
| | | TTTTTTTTcagccaactccaaTTTTTTTT- |
| | | TGCGTCGTCTACTACCTCTCGGG |
| NKX2-2 | 1181 | -GATCGCTCGGGCAA-GTTTTAGAGCTA- |
| | | CCGACGTCTACGGACGGGAGCTA- |
| | | TTTTTTTTcagccaactccaaTTTTTTTT- |
| | | TAGCTCCCGTCCGTAGACGTCGG |
| NKX2-2 | 1182 | -GACCCGCCCACACG-GTTTTAGAGCTA- |
| | | CCGACGTCTACGGACGGGAGCTA- |
| | | TTTTTTTTcagccaactccaaTTTTTTTT- |
| | | TAGCTCCCGTCCGTAGACGTCGG |
| NKX2-2 | 1183 | g-AACCTGGGGAGGCG-GTTTTAGAGCTA- |
| | | CCGACGTCTACGGACGGGAGCTA- |
| | | TTTTTTTTcagccaactccaaTTTTTTTT- |
| | | TAGCTCCCGTCCGTAGACGTCGG |
| NKX2-2 | 1184 | -GTTGGCTGGGAGCG-GTTTTAGAGCTA- |
| | | CCGACGTCTACGGACGGGAGCTA- |
| | | TTTTTTTTcagccaactccaaTTTTTTTT- |
| | | TAGCTCCCGTCCGTAGACGTCGG |
| NKX2-2 | 1185 | -GATCGCTCGGGCAA-GTTTTAGAGCTA- |
| | | CCAAAGCTCATTCGCGACTGAGC- |
| | | TTTTTTTTcagccaactccaaTTTTTTTT- |
| | | GCTCAGTCGCGAATGAGCTTTGG |
| NKX2-2 | 1186 | -GACCCGCCCACACG-GTTTTAGAGCTA- |
| | | CCAAAGCTCATTCGCGACTGAGC- |
| | | TTTTTTTTcagccaactccaaTTTTTTTT- |
| | | GCTCAGTCGCGAATGAGCTTTGG |
| NKX2-2 | 1187 | g-AACCTGGGGAGGCG-GTTTTAGAGCTA- |
| | | CCAAAGCTCATTCGCGACTGAGC- |
| | | TTTTTTTTcagccaactccaaTTTTTTTT- |
| | | GCTCAGTCGCGAATGAGCTTTGG |
| NKX2-2 | 1188 | -GTTGGCTGGGAGCG-GTTTTAGAGCTA- |
| | | CCAAAGCTCATTCGCGACTGAGC- |
| | | TTTTTTTTcagccaactccaaTTTTTTTT- |
| | | GCTCAGTCGCGAATGAGCTTTGG |
| NKX2-2 | 1189 | -GATCGCTCGGGCAA-GTTTTAGAGCTA- |
| | | CCATGGCACGATCGACACGGAGG- |
| | | TTTTTTTTcagccaactccaaTTTTTTTT- |
| | | CCTCCGTGTCGATCGTGCCATGG |
| NKX2-2 | 1190 | -GACCCGCCCACACG-GTTTTAGAGCTA- |
| | | CCATGGCACGATCGACACGGAGG- |
| | | TTTTTTTTcagccaactccaaTTTTTTTT- |
| | | CCTCCGTGTCGATCGTGCCATGG |
| NKX2-2 | 1191 | g-AACCTGGGGAGGCG-GTTTTAGAGCTA- |
| | | CCATGGCACGATCGACACGGAGG- |
| | | TTTTTTTTcagccaactccaaTTTTTTTT- |
| | | CCTCCGTGTCGATCGTGCCATGG |
| NKX2-2 | 1192 | -GTTGGCTGGGAGCG-GTTTTAGAGCTA- |
| | | CCATGGCACGATCGACACGGAGG- |
| | | TTTTTTTTcagccaactccaaTTTTTTTT- |
| | | CCTCCGTGTCGATCGTGCCATGG |
| NKX2-2 | 1193 | -GATCGCTCGGGCAA-GTTTTAGAGCTA- |
| | | CCCGAACTCTCTATCGAACGAGT- |
| | | TTTTTTTTcagccaactccaaTTTTTTTT- |
| | | ACTCGTTCGATAGAGAGTTCGGG |
| NKX2-2 | 1194 | -GACCCGCCCACACG-GTTTTAGAGCTA- |
| | | CCCGAACTCTCTATCGAACGAGT- |
| | | TTTTTTTTcagccaactccaaTTTTTTTT- |
| | | ACTCGTTCGATAGAGAGTTCGGG |
| NKX2-2 | 1195 | g-AACCTGGGGAGGCG-GTTTTAGAGCTA- |
| | | CCCGAACTCTCTATCGAACGAGT- |
| | | TTTTTTTTcagccaactccaaTTTTTTTT- |
| | | ACTCGTTCGATAGAGAGTTCGGG |
| NKX2-2 | 1196 | -GTTGGCTGGGAGCG-GTTTTAGAGCTA- |
| | | CCCGAACTCTCTATCGAACGAGT- |
| | | TTTTTTTTcagccaactccaaTTTTTTTT- |
| | | ACTCGTTCGATAGAGAGTTCGGG |
| NKX6-1 | 1197 | g-TACGGTCTCCGGCG-GTTTTAGAGCTA- |
| | | CCGTCGTTGTACCGTCTACTTGAC- |
| | | TTTTTTTTcagccaactccaaTTTTTTTT- |
| | | GTCAAGTAGACGGTACAACGACGG |
| NKX6-1 | 1198 | -GCCTCCCGCGTGGA-GTTTTAGAGCTA- |
| | | CCGTCGTTGTACCGTCTACTTGAC- |
| | | TTTTTTTTcagccaactccaaTTTTTTTT- |
| | | GTCAAGTAGACGGTACAACGACGG |
| NKX6-1 | 1199 | g-CAGCGGGGGATACG-GTTTTAGAGCTA- |
| | | CCGTCGTTGTACCGTCTACTTGAC- |
| | | TTTTTTTTcagccaactccaaTTTTTTTT- |
| | | GTCAAGTAGACGGTACAACGACGG |
| NKX6-1 | 1200 | g-CCCCCCGTGGCCGG-GTTTTAGAGCTA- |
| | | CCGTCGTTGTACCGTCTACTTGAC- |
| | | TTTTTTTTcagccaactccaaTTTTTTTT- |
| | | GTCAAGTAGACGGTACAACGACGG |
| NKX6-1 | 1201 | g-TACGGTCTCCGGCG-GTTTTAGAGCTA- |
| | | CCTACACTCGACATCGGTAGCTA- |
| | | TTTTTTTTcagccaactccaaTTTTTTTT- |
| | | TAGCTACCGATGTCGAGTGTAGG |
| NKX6-1 | 1202 | -GCCTCCCGCGTGGA-GTTTTAGAGCTA- |
| | | CCTACACTCGACATCGGTAGCTA- |
| | | TTTTTTTTcagccaactccaaTTTTTTTT- |
| | | TAGCTACCGATGTCGAGTGTAGG |
| NKX6-1 | 1203 | g-CAGCGGGGGATACG-GTTTTAGAGCTA- |
| | | CCTACACTCGACATCGGTAGCTA- |
| | | TTTTTTTTcagccaactccaaTTTTTTTT- |
| | | TAGCTACCGATGTCGAGTGTAGG |
| NKX6-1 | 1204 | g-CCCCCCGTGGCCGG-GTTTTAGAGCTA- |
| | | CCTACACTCGACATCGGTAGCTA- |
| | | TTTTTTTTcagccaactccaaTTTTTTTT- |
| | | TAGCTACCGATGTCGAGTGTAGG |
| NKX6-1 | 1205 | g-TACGGTCTCCGGCG-GTTTTAGAGCTA- |
| | | CCCTGGCGGAACGTTCGAGTAAT- |
| | | TTTTTTTTcagccaactccaaTTTTTTTT- |
| | | ATTACTCGAACGTTCCGCCAGGG |
| NKX6-1 | 1206 | -GCCTCCCGCGTGGA-GTTTTAGAGCTA- |
| | | CCCTGGCGGAACGTTCGAGTAAT- |
| | | TTTTTTTTcagccaactccaaTTTTTTTT- |
| | | ATTACTCGAACGTTCCGCCAGGG |
| NKX6-1 | 1207 | g-CAGCGGGGGATACG-GTTTTAGAGCTA- |
| | | CCCTGGCGGAACGTTCGAGTAAT- |
| | | TTTTTTTTcagccaactccaaTTTTTTTT- |
| | | ATTACTCGAACGTTCCGCCAGGG |
| NKX6-1 | 1208 | g-CCCCCCGTGGCCGG-GTTTTAGAGCTA- |
| | | CCCTGGCGGAACGTTCGAGTAAT- |
| | | TTTTTTTTcagccaactccaaTTTTTTTT- |
| | | ATTACTCGAACGTTCCGCCAGGG |
| NKX6-1 | 1209 | g-TACGGTCTCCGGCG-GTTTTAGAGCTA- |
| | | CCTACACGATAGTGGTCGTGCGC- |
| | | TTTTTTTTcagccaactccaaTTTTTTTT- |
| | | GCGCACGACCACTATCGTGTAGG |
| NKX6-1 | 1210 | -GCCTCCCGCGTGGA-GTTTTAGAGCTA- |
| | | CCTACACGATAGTGGTCGTGCGC- |
| | | TTTTTTTTcagccaactccaaTTTTTTTT- |
| | | GCGCACGACCACTATCGTGTAGG |
| NKX6-1 | 1211 | g-CAGCGGGGGATACG-GTTTTAGAGCTA- |
| | | CCTACACGATAGTGGTCGTGCGC- |
| | | TTTTTTTTcagccaactccaaTTTTTTTT- |
| | | GCGCACGACCACTATCGTGTAGG |
| NKX6-1 | 1212 | g-CCCCCCGTGGCCGG-GTTTTAGAGCTA- |
| | | CCTACACGATAGTGGTCGTGCGC- |
| | | TTTTTTTTcagccaactccaaTTTTTTTT- |
| | | GCGCACGACCACTATCGTGTAGG |
| NKX6-1 | 1213 | g-TACGGTCTCCGGCG-GTTTTAGAGCTA- |
| | | CCTTCCCGACTTCCGTAGGAGCGC- |
| | | TTTTTTTTcagccaactccaaTTTTTTTT- |
| | | GCGCTCCTACGGAAGTCGGGAAGG |
| NKX6-1 | 1214 | -GCCTCCCGCGTGGA-GTTTTAGAGCTA- |
| | | CCTTCCCGACTTCCGTAGGAGCGC- |
| | | TTTTTTTTcagccaactccaaTTTTTTTT- |
| | | GCGCTCCTACGGAAGTCGGGAAGG |
| NKX6-1 | 1215 | g-CAGCGGGGGATACG-GTTTTAGAGCTA- |
| | | CCTTCCCGACTTCCGTAGGAGCGC- |
| | | TTTTTTTTcagccaactccaaTTTTTTTT- |
| | | GCGCTCCTACGGAAGTCGGGAAGG |
| NKX6-1 | 1216 | g-CCCCCCGTGGCCGG-GTTTTAGAGCTA- |
| | | CCTTCCCGACTTCCGTAGGAGCGC- |
| | | TTTTTTTTcagccaactccaaTTTTTTTT- |
| | | GCGCTCCTACGGAAGTCGGGAAGG |
| NKX6-1 | 1217 | g-TACGGTCTCCGGCG-GTTTTAGAGCTA- |
| | | CCTGAAGGTAAAGATCGGGTCCTC- |
| | | TTTTTTTTcagccaactccaaTTTTTTTT- |
| | | GAGGACCCGATCTTTACCTTCAGG |
| NKX6-1 | 1218 | -GCCTCCCGCGTGGA-GTTTTAGAGCTA- |
| | | CCTGAAGGTAAAGATCGGGTCCTC- |
| | | TTTTTTTTcagccaactccaaTTTTTTTT- |
| | | GAGGACCCGATCTTTACCTTCAGG |
| NKX6-1 | 1219 | g-CAGCGGGGGATACG-GTTTTAGAGCTA- |
| | | CCTGAAGGTAAAGATCGGGTCCTC- |
| | | TTTTTTTTcagccaactccaaTTTTTTTT- |
| | | GAGGACCCGATCTTTACCTTCAGG |
| NKX6-1 | 1220 | g-CCCCCCGTGGCCGG-GTTTTAGAGCTA- |
| | | CCTGAAGGTAAAGATCGGGTCCTC- |
| | | TTTTTTTTcagccaactccaaTTTTTTTT- |
| | | GAGGACCCGATCTTTACCTTCAGG |
| NKX6-1 | 1221 | g-TACGGTCTCCGGCG-GTTTTAGAGCTA- |
| | | CCTGGTTATAGCGGACGCACTGT- |
| | | TTTTTTTTcagccaactccaaTTTTTTTT- |
| | | ACAGTGCGTCCGCTATAACCAGG |
| NKX6-1 | 1222 | -GCCTCCCGCGTGGA-GTTTTAGAGCTA- |
| | | CCTGGTTATAGCGGACGCACTGT- |
| | | TTTTTTTTcagccaactccaaTTTTTTTT- |
| | | ACAGTGCGTCCGCTATAACCAGG |
| NKX6-1 | 1223 | g-CAGCGGGGGATACG-GTTTTAGAGCTA- |
| | | CCTGGTTATAGCGGACGCACTGT- |
| | | TTTTTTTTcagccaactccaaTTTTTTTT- |
| | | ACAGTGCGTCCGCTATAACCAGG |
| NKX6-1 | 1224 | g-CCCCCCGTGGCCGG-GTTTTAGAGCTA- |
| | | CCTGGTTATAGCGGACGCACTGT- |
| | | TTTTTTTTcagccaactccaaTTTTTTTT- |
| | | ACAGTGCGTCCGCTATAACCAGG |
| NKX6-1 | 1225 | g-TACGGTCTCCGGCG-GTTTTAGAGCTA- |
| | | CCGCATCGTATTATCTGCGAAGC- |
| | | TTTTTTTTcagccaactccaaTTTTTTTT- |
| | | GCTTCGCAGATAATACGATGCGG |
| NKX6-1 | 1226 | -GCCTCCCGCGTGGA-GTTTTAGAGCTA- |
| | | CCGCATCGTATTATCTGCGAAGC- |
| | | TTTTTTTTcagccaactccaaTTTTTTTT- |
| | | GCTTCGCAGATAATACGATGCGG |
| NKX6-1 | 1227 | g-CAGCGGGGGATACG-GTTTTAGAGCTA- |
| | | CCGCATCGTATTATCTGCGAAGC- |
| | | TTTTTTTTcagccaactccaaTTTTTTTT- |
| | | GCTTCGCAGATAATACGATGCGG |
| NKX6-1 | 1228 | g-CCCCCCGTGGCCGG-GTTTTAGAGCTA- |
| | | CCGCATCGTATTATCTGCGAAGC- |
| | | TTTTTTTTcagccaactccaaTTTTTTTT- |
| | | GCTTCGCAGATAATACGATGCGG |
| NKX6-1 | 1229 | g-TACGGTCTCCGGCG-GTTTTAGAGCTA- |
| | | CCGCTAGGACGTTCAACGGAGTC- |
| | | TTTTTTTTcagccaactccaaTTTTTTTT- |
| | | GACTCCGTTGAACGTCCTAGCGG |
| NKX6-1 | 1230 | -GCCTCCCGCGTGGA-GTTTTAGAGCTA- |
| | | CCGCTAGGACGTTCAACGGAGTC- |
| | | TTTTTTTTcagccaactccaaTTTTTTTT- |
| | | GACTCCGTTGAACGTCCTAGCGG |
| NKX6-1 | 1231 | g-CAGCGGGGGATACG-GTTTTAGAGCTA- |
| | | CCGCTAGGACGTTCAACGGAGTC- |
| | | TTTTTTTTcagccaactccaaTTTTTTTT- |
| | | GACTCCGTTGAACGTCCTAGCGG |
| NKX6-1 | 1232 | g-CCCCCCGTGGCCGG-GTTTTAGAGCTA- |
| | | CCGCTAGGACGTTCAACGGAGTC- |
| | | TTTTTTTTcagccaactccaaTTTTTTTT- |
| | | GACTCCGTTGAACGTCCTAGCGG |
| NKX6-1 | 1233 | g-TACGGTCTCCGGCG-GTTTTAGAGCTA- |
| | | CCATAGCGGTACTATCGGCATCT- |
| | | TTTTTTTTcagccaactccaaTTTTTTTT- |
| | | AGATGCCGATAGTACCGCTATGG |
| NKX6-1 | 1234 | -GCCTCCCGCGTGGA-GTTTTAGAGCTA- |
| | | CCATAGCGGTACTATCGGCATCT- |
| | | TTTTTTTTcagccaactccaaTTTTTTTT- |
| | | AGATGCCGATAGTACCGCTATGG |
| NKX6-1 | 1235 | g-CAGCGGGGGATACG-GTTTTAGAGCTA- |
| | | CCATAGCGGTACTATCGGCATCT- |
| | | TTTTTTTTcagccaactccaaTTTTTTTT- |
| | | AGATGCCGATAGTACCGCTATGG |
| NKX6-1 | 1236 | g-CCCCCCGTGGCCGG-GTTTTAGAGCTA- |
| | | CCATAGCGGTACTATCGGCATCT- |
| | | TTTTTTTTcagccaactccaaTTTTTTTT- |
| | | AGATGCCGATAGTACCGCTATGG |
| NKX6-1 | 1237 | g-TACGGTCTCCGGCG-GTTTTAGAGCTA- |
| | | CCTCGTACTAGTCTCGCATGACC- |
| | | TTTTTTTTcagccaactccaaTTTTTTTT- |
| | | GGTCATGCGAGACTAGTACGAGG |
| NKX6-1 | 1238 | -GCCTCCCGCGTGGA-GTTTTAGAGCTA- |
| | | CCTCGTACTAGTCTCGCATGACC- |
| | | TTTTTTTTcagccaactccaaTTTTTTTT- |
| | | GGTCATGCGAGACTAGTACGAGG |
| NKX6-1 | 1239 | g-CAGCGGGGGATACG-GTTTTAGAGCTA- |
| | | CCTCGTACTAGTCTCGCATGACC- |
| | | TTTTTTTTcagccaactccaaTTTTTTTT- |
| | | GGTCATGCGAGACTAGTACGAGG |
| NKX6-1 | 1240 | g-CCCCCCGTGGCCGG-GTTTTAGAGCTA- |
| | | CCTCGTACTAGTCTCGCATGACC- |
| | | TTTTTTTTcagccaactccaaTTTTTTTT- |
| | | GGTCATGCGAGACTAGTACGAGG |
| NKX6-1 | 1241 | g-TACGGTCTCCGGCG-GTTTTAGAGCTA- |
| | | CCGATAGTGCTAAACGACGCTTT- |
| | | TTTTTTTTcagccaactccaaTTTTTTTT- |
| | | AAAGCGTCGTTTAGCACTATCGG |
| NKX6-1 | 1242 | -GCCTCCCGCGTGGA-GTTTTAGAGCTA- |
| | | CCGATAGTGCTAAACGACGCTTT- |
| | | TTTTTTTTcagccaactccaaTTTTTTTT- |
| | | AAAGCGTCGTTTAGCACTATCGG |
| NKX6-1 | 1243 | g-CAGCGGGGGATACG-GTTTTAGAGCTA- |
| | | CCGATAGTGCTAAACGACGCTTT- |
| | | TTTTTTTTcagccaactccaaTTTTTTTT- |
| | | AAAGCGTCGTTTAGCACTATCGG |
| NKX6-1 | 1244 | g-CCCCCCGTGGCCGG-GTTTTAGAGCTA- |
| | | CCGATAGTGCTAAACGACGCTTT- |
| | | TTTTTTTTcagccaactccaaTTTTTTTT- |
| | | AAAGCGTCGTTTAGCACTATCGG |
| NKX6-1 | 1245 | g-TACGGTCTCCGGCG-GTTTTAGAGCTA- |
| | | CCCGTTATCGACGTTCAAGGAAC- |
| | | TTTTTTTTcagccaactccaaTTTTTTTT- |
| | | GTTCCTTGAACGTCGATAACGGG |
| NKX6-1 | 1246 | -GCCTCCCGCGTGGA-GTTTTAGAGCTA- |
| | | CCCGTTATCGACGTTCAAGGAAC- |
| | | TTTTTTTTcagccaactccaaTTTTTTTT- |
| | | GTTCCTTGAACGTCGATAACGGG |
| NKX6-1 | 1247 | g-CAGCGGGGGATACG-GTTTTAGAGCTA- |
| | | CCCGTTATCGACGTTCAAGGAAC- |
| | | TTTTTTTTcagccaactccaaTTTTTTTT- |
| | | GTTCCTTGAACGTCGATAACGGG |
| NKX6-1 | 1248 | g-CCCCCCGTGGCCGG-GTTTTAGAGCTA- |
| | | CCCGTTATCGACGTTCAAGGAAC- |
| | | TTTTTTTTcagccaactccaaTTTTTTTT- |
| | | GTTCCTTGAACGTCGATAACGGG |
| NKX6-1 | 1249 | g-TACGGTCTCCGGCG-GTTTTAGAGCTA- |
| | | CCGATCAATGCGGTCTGCGTAAC- |
| | | TTTTTTTTcagccaactccaaTTTTTTTT- |
| | | GTTACGCAGACCGCATTGATCGG |
| NKX6-1 | 1250 | -GCCTCCCGCGTGGA-GTTTTAGAGCTA- |
| | | CCGATCAATGCGGTCTGCGTAAC- |
| | | TTTTTTTTcagccaactccaaTTTTTTTT- |
| | | GTTACGCAGACCGCATTGATCGG |
| NKX6-1 | 1251 | g-CAGCGGGGGATACG-GTTTTAGAGCTA- |
| | | CCGATCAATGCGGTCTGCGTAAC- |
| | | TTTTTTTTcagccaactccaaTTTTTTTT- |
| | | GTTACGCAGACCGCATTGATCGG |
| NKX6-1 | 1252 | g-CCCCCCGTGGCCGG-GTTTTAGAGCTA- |
| | | CCGATCAATGCGGTCTGCGTAAC- |
| | | TTTTTTTTcagccaactccaaTTTTTTTT- |
| | | GTTACGCAGACCGCATTGATCGG |
| NKX6-1 | 1253 | g-TACGGTCTCCGGCG-GTTTTAGAGCTA- |
| | | CCCTTACTCGCGATACTCTCGAC- |
| | | TTTTTTTTcagccaactccaaTTTTTTTT- |
| | | GTCGAGAGTATCGCGAGTAAGGG |
| NKX6-1 | 1254 | -GCCTCCCGCGTGGA-GTTTTAGAGCTA- |
| | | CCCTTACTCGCGATACTCTCGAC- |
| | | TTTTTTTTcagccaactccaaTTTTTTTT- |
| | | GTCGAGAGTATCGCGAGTAAGGG |
| NKX6-1 | 1255 | g-CAGCGGGGGATACG-GTTTTAGAGCTA- |
| | | CCCTTACTCGCGATACTCTCGAC- |
| | | TTTTTTTTcagccaactccaaTTTTTTTT- |
| | | GTCGAGAGTATCGCGAGTAAGGG |
| NKX6-1 | 1256 | g-CCCCCCGTGGCCGG-GTTTTAGAGCTA- |
| | | CCCTTACTCGCGATACTCTCGAC- |
| | | TTTTTTTTcagccaactccaaTTTTTTTT- |
| | | GTCGAGAGTATCGCGAGTAAGGG |
| NKX6-1 | 1257 | g-TACGGTCTCCGGCG-GTTTTAGAGCTA- |
| | | CCGCGGACGGTAAGCACGGAATA- |
| | | TTTTTTTTcagccaactccaaTTTTTTTT- |
| | | TATTCCGTGCTTACCGTCCGCGG |
| NKX6-1 | 1258 | -GCCTCCCGCGTGGA-GTTTTAGAGCTA- |
| | | CCGCGGACGGTAAGCACGGAATA- |
| | | TTTTTTTTcagccaactccaaTTTTTTTT- |
| | | TATTCCGTGCTTACCGTCCGCGG |
| NKX6-1 | 1259 | g-CAGCGGGGGATACG-GTTTTAGAGCTA- |
| | | CCGCGGACGGTAAGCACGGAATA- |
| | | TTTTTTTTcagccaactccaaTTTTTTTT- |
| | | TATTCCGTGCTTACCGTCCGCGG |
| NKX6-1 | 1260 | g-CCCCCCGTGGCCGG-GTTTTAGAGCTA- |
| | | CCGCGGACGGTAAGCACGGAATA- |
| | | TTTTTTTTcagccaactccaaTTTTTTTT- |
| | | TATTCCGTGCTTACCGTCCGCGG |
| NKX6-1 | 1261 | g-TACGGTCTCCGGCG-GTTTTAGAGCTA- |
| | | CCTATAGTCACGAATCGTAGGGT- |
| | | TTTTTTTTcagccaactccaaTTTTTTTT- |
| | | ACCCTACGATTCGTGACTATAGG |
| NKX6-1 | 1262 | -GCCTCCCGCGTGGA-GTTTTAGAGCTA- |
| | | CCTATAGTCACGAATCGTAGGGT- |
| | | TTTTTTTTcagccaactccaaTTTTTTTT- |
| | | ACCCTACGATTCGTGACTATAGG |
| NKX6-1 | 1263 | g-CAGCGGGGGATACG-GTTTTAGAGCTA- |
| | | CCTATAGTCACGAATCGTAGGGT- |
| | | TTTTTTTTcagccaactccaaTTTTTTTT- |
| | | ACCCTACGATTCGTGACTATAGG |
| NKX6-1 | 1264 | g-CCCCCCGTGGCCGG-GTTTTAGAGCTA- |
| | | CCTATAGTCACGAATCGTAGGGT- |
| | | TTTTTTTTcagccaactccaaTTTTTTTT- |
| | | ACCCTACGATTCGTGACTATAGG |
| NKX6-1 | 1265 | g-TACGGTCTCCGGCG-GTTTTAGAGCTA- |
| | | CCCGTCGTCACGTATGCGTAGCA- |
| | | TTTTTTTTcagccaactccaaTTTTTTTT- |
| | | TGCTACGCATACGTGACGACGGG |
| NKX6-1 | 1266 | -GCCTCCCGCGTGGA-GTTTTAGAGCTA- |
| | | CCCGTCGTCACGTATGCGTAGCA- |
| | | TTTTTTTTcagccaactccaaTTTTTTTT- |
| | | TGCTACGCATACGTGACGACGGG |
| NKX6-1 | 1267 | g-CAGCGGGGGATACG-GTTTTAGAGCTA- |
| | | CCCGTCGTCACGTATGCGTAGCA- |
| | | TTTTTTTTcagccaactccaaTTTTTTTT- |
| | | TGCTACGCATACGTGACGACGGG |
| NKX6-1 | 1268 | g-CCCCCCGTGGCCGG-GTTTTAGAGCTA- |
| | | CCCGTCGTCACGTATGCGTAGCA- |
| | | TTTTTTTTcagccaactccaaTTTTTTTT- |
| | | TGCTACGCATACGTGACGACGGG |
| NKX6-1 | 1269 | g-TACGGTCTCCGGCG-GTTTTAGAGCTA- |
| | | CCCGAGAGGTAGTAGACGACGCA- |
| | | TTTTTTTTcagccaactccaaTTTTTTTT- |
| | | TGCGTCGTCTACTACCTCTCGGG |
| NKX6-1 | 1270 | -GCCTCCCGCGTGGA-GTTTTAGAGCTA- |
| | | CCCGAGAGGTAGTAGACGACGCA- |
| | | TTTTTTTTcagccaactccaaTTTTTTTT- |
| | | TGCGTCGTCTACTACCTCTCGGG |
| NKX6-1 | 1271 | g-CAGCGGGGGATACG-GTTTTAGAGCTA- |
| | | CCCGAGAGGTAGTAGACGACGCA- |
| | | TTTTTTTTcagccaactccaaTTTTTTTT- |
| | | TGCGTCGTCTACTACCTCTCGGG |
| NKX6-1 | 1272 | g-CCCCCCGTGGCCGG-GTTTTAGAGCTA- |
| | | CCCGAGAGGTAGTAGACGACGCA- |
| | | TTTTTTTTcagccaactccaaTTTTTTTT- |
| | | TGCGTCGTCTACTACCTCTCGGG |
| NKX6-1 | 1273 | g-TACGGTCTCCGGCG-GTTTTAGAGCTA- |
| | | CCGACGTCTACGGACGGGAGCTA- |
| | | TTTTTTTTcagccaactccaaTTTTTTTT- |
| | | TAGCTCCCGTCCGTAGACGTCGG |
| NKX6-1 | 1274 | -GCCTCCCGCGTGGA-GTTTTAGAGCTA- |
| | | CCGACGTCTACGGACGGGAGCTA- |
| | | TTTTTTTTcagccaactccaaTTTTTTTT- |
| | | TAGCTCCCGTCCGTAGACGTCGG |
| NKX6-1 | 1275 | g-CAGCGGGGGATACG-GTTTTAGAGCTA- |
| | | CCGACGTCTACGGACGGGAGCTA- |
| | | TTTTTTTTcagccaactccaaTTTTTTTT- |
| | | TAGCTCCCGTCCGTAGACGTCGG |
| NKX6-1 | 1276 | g-CCCCCCGTGGCCGG-GTTTTAGAGCTA- |
| | | CCGACGTCTACGGACGGGAGCTA- |
| | | TTTTTTTTcagccaactccaaTTTTTTTT- |
| | | TAGCTCCCGTCCGTAGACGTCGG |
| NKX6-1 | 1277 | g-TACGGTCTCCGGCG-GTTTTAGAGCTA- |
| | | CCAAAGCTCATTCGCGACTGAGC- |
| | | TTTTTTTTcagccaactccaaTTTTTTTT- |
| | | GCTCAGTCGCGAATGAGCTTTGG |
| NKX6-1 | 1278 | -GCCTCCCGCGTGGA-GTTTTAGAGCTA- |
| | | CCAAAGCTCATTCGCGACTGAGC- |
| | | TTTTTTTTcagccaactccaaTTTTTTTT- |
| | | GCTCAGTCGCGAATGAGCTTTGG |
| NKX6-1 | 1279 | g-CAGCGGGGGATACG-GTTTTAGAGCTA- |
| | | CCAAAGCTCATTCGCGACTGAGC- |
| | | TTTTTTTTcagccaactccaaTTTTTTTT- |
| | | GCTCAGTCGCGAATGAGCTTTGG |
| NKX6-1 | 1280 | g-CCCCCCGTGGCCGG-GTTTTAGAGCTA- |
| | | CCAAAGCTCATTCGCGACTGAGC- |
| | | TTTTTTTTcagccaactccaaTTTTTTTT- |
| | | GCTCAGTCGCGAATGAGCTTTGG |
| NKX6-1 | 1281 | g-TACGGTCTCCGGCG-GTTTTAGAGCTA- |
| | | CCATGGCACGATCGACACGGAGG- |
| | | TTTTTTTTcagccaactccaaTTTTTTTT- |
| | | CCTCCGTGTCGATCGTGCCATGG |
| NKX6-1 | 1282 | -GCCTCCCGCGTGGA-GTTTTAGAGCTA- |
| | | CCATGGCACGATCGACACGGAGG- |
| | | TTTTTTTTcagccaactccaaTTTTTTTT- |
| | | CCTCCGTGTCGATCGTGCCATGG |
| NKX6-1 | 1283 | g-CAGCGGGGGATACG-GTTTTAGAGCTA- |
| | | CCATGGCACGATCGACACGGAGG- |
| | | TTTTTTTTcagccaactccaaTTTTTTTT- |
| | | CCTCCGTGTCGATCGTGCCATGG |
| NKX6-1 | 1284 | g-CCCCCCGTGGCCGG-GTTTTAGAGCTA- |
| | | CCATGGCACGATCGACACGGAGG- |
| | | TTTTTTTTcagccaactccaaTTTTTTTT- |
| | | CCTCCGTGTCGATCGTGCCATGG |
| NKX6-1 | 1285 | g-TACGGTCTCCGGCG-GTTTTAGAGCTA- |
| | | CCCGAACTCTCTATCGAACGAGT- |
| | | TTTTTTTTcagccaactccaaTTTTTTTT- |
| | | ACTCGTTCGATAGAGAGTTCGGG |
| NKX6-1 | 1286 | -GCCTCCCGCGTGGA-GTTTTAGAGCTA- |
| | | CCCGAACTCTCTATCGAACGAGT- |
| | | TTTTTTTTcagccaactccaaTTTTTTTT- |
| | | ACTCGTTCGATAGAGAGTTCGGG |
| NKX6-1 | 1287 | g-CAGCGGGGGATACG-GTTTTAGAGCTA- |
| | | CCCGAACTCTCTATCGAACGAGT- |
| | | TTTTTTTTcagccaactccaaTTTTTTTT- |
| | | ACTCGTTCGATAGAGAGTTCGGG |
| NKX6-1 | 1288 | g-CCCCCCGTGGCCGG-GTTTTAGAGCTA- |
| | | CCCGAACTCTCTATCGAACGAGT- |
| | | TTTTTTTTcagccaactccaaTTTTTTTT- |
| | | ACTCGTTCGATAGAGAGTTCGGG |
| ONECUT1 | 1289 | g-CGGCTACCGAACCG-GTTTTAGAGCTA- |
| | | CCGTCGTTGTACCGTCTACTTGAC- |
| | | TTTTTTTTcagccaactccaaTTTTTTTT- |
| | | GTCAAGTAGACGGTACAACGACGG |
| ONECUT1 | 1290 | g-CGCCGCGACCTAGG-GTTTTAGAGCTA- |
| | | CCGTCGTTGTACCGTCTACTTGAC- |
| | | TTTTTTTTcagccaactccaaTTTTTTTT- |
| | | GTCAAGTAGACGGTACAACGACGG |
| ONECUT1 | 1291 | -GCGCTGGATGGCCA-GTTTTAGAGCTA- |
| | | CCGTCGTTGTACCGTCTACTTGAC- |
| | | TTTTTTTTcagccaactccaaTTTTTTTT- |
| | | GTCAAGTAGACGGTACAACGACGG |
| ONECUT1 | 1292 | -GCCGCTGCAATCCC-GTTTTAGAGCTA- |
| | | CCGTCGTTGTACCGTCTACTTGAC- |
| | | TTTTTTTTcagccaactccaaTTTTTTTT- |
| | | GTCAAGTAGACGGTACAACGACGG |
| ONECUT1 | 1293 | g-CGGCTACCGAACCG-GTTTTAGAGCTA- |
| | | CCTACACTCGACATCGGTAGCTA- |
| | | TTTTTTTTcagccaactccaaTTTTTTTT- |
| | | TAGCTACCGATGTCGAGTGTAGG |
| ONECUT1 | 1294 | g-CGCCGCGACCTAGG-GTTTTAGAGCTA- |
| | | CCTACACTCGACATCGGTAGCTA- |
| | | TTTTTTTTcagccaactccaaTTTTTTTT- |
| | | TAGCTACCGATGTCGAGTGTAGG |
| ONECUT1 | 1295 | -GCGCTGGATGGCCA-GTTTTAGAGCTA- |
| | | CCTACACTCGACATCGGTAGCTA- |
| | | TTTTTTTTcagccaactccaaTTTTTTTT- |
| | | TAGCTACCGATGTCGAGTGTAGG |
| ONECUT1 | 1296 | -GCCGCTGCAATCCC-GTTTTAGAGCTA- |
| | | CCTACACTCGACATCGGTAGCTA- |
| | | TTTTTTTTcagccaactccaaTTTTTTTT- |
| | | TAGCTACCGATGTCGAGTGTAGG |
| ONECUT1 | 1297 | g-CGGCTACCGAACCG-GTTTTAGAGCTA- |
| | | CCCTGGCGGAACGTTCGAGTAAT- |
| | | TTTTTTTTcagccaactccaaTTTTTTTT- |
| | | ATTACTCGAACGTTCCGCCAGGG |
| ONECUT1 | 1298 | g-CGCCGCGACCTAGG-GTTTTAGAGCTA- |
| | | CCCTGGCGGAACGTTCGAGTAAT- |
| | | TTTTTTTTcagccaactccaaTTTTTTTT- |
| | | ATTACTCGAACGTTCCGCCAGGG |
| ONECUT1 | 1299 | -GCGCTGGATGGCCA-GTTTTAGAGCTA- |
| | | CCCTGGCGGAACGTTCGAGTAAT- |
| | | TTTTTTTTcagccaactccaaTTTTTTTT- |
| | | ATTACTCGAACGTTCCGCCAGGG |
| ONECUT1 | 1300 | -GCCGCTGCAATCCC-GTTTTAGAGCTA- |
| | | CCCTGGCGGAACGTTCGAGTAAT- |
| | | TTTTTTTTcagccaactccaaTTTTTTTT- |
| | | ATTACTCGAACGTTCCGCCAGGG |
| ONECUT1 | 1301 | g-CGGCTACCGAACCG-GTTTTAGAGCTA- |
| | | CCTACACGATAGTGGTCGTGCGC- |
| | | TTTTTTTTcagccaactccaaTTTTTTTT- |
| | | GCGCACGACCACTATCGTGTAGG |
| ONECUT1 | 1302 | g-CGCCGCGACCTAGG-GTTTTAGAGCTA- |
| | | CCTACACGATAGTGGTCGTGCGC- |
| | | TTTTTTTTcagccaactccaaTTTTTTTT- |
| | | GCGCACGACCACTATCGTGTAGG |
| ONECUT1 | 1303 | -GCGCTGGATGGCCA-GTTTTAGAGCTA- |
| | | CCTACACGATAGTGGTCGTGCGC- |
| | | TTTTTTTTcagccaactccaaTTTTTTTT- |
| | | GCGCACGACCACTATCGTGTAGG |
| ONECUT1 | 1304 | -GCCGCTGCAATCCC-GTTTTAGAGCTA- |
| | | CCTACACGATAGTGGTCGTGCGC- |
| | | TTTTTTTTcagccaactccaaTTTTTTTT- |
| | | GCGCACGACCACTATCGTGTAGG |
| ONECUT1 | 1305 | g-CGGCTACCGAACCG-GTTTTAGAGCTA- |
| | | CCTTCCCGACTTCCGTAGGAGCGC- |
| | | TTTTTTTTcagccaactccaaTTTTTTTT- |
| | | GCGCTCCTACGGAAGTCGGGAAGG |
| ONECUT1 | 1306 | g-CGCCGCGACCTAGG-GTTTTAGAGCTA- |
| | | CCTTCCCGACTTCCGTAGGAGCGC- |
| | | TTTTTTTTcagccaactccaaTTTTTTTT- |
| | | GCGCTCCTACGGAAGTCGGGAAGG |
| ONECUT1 | 1307 | -GCGCTGGATGGCCA-GTTTTAGAGCTA- |
| | | CCTTCCCGACTTCCGTAGGAGCGC- |
| | | TTTTTTTTcagccaactccaaTTTTTTTT- |
| | | GCGCTCCTACGGAAGTCGGGAAGG |
| ONECUT1 | 1308 | -GCCGCTGCAATCCC-GTTTTAGAGCTA- |
| | | CCTTCCCGACTTCCGTAGGAGCGC- |
| | | TTTTTTTTcagccaactccaaTTTTTTTT- |
| | | GCGCTCCTACGGAAGTCGGGAAGG |
| ONECUT1 | 1309 | g-CGGCTACCGAACCG-GTTTTAGAGCTA- |
| | | CCTGAAGGTAAAGATCGGGTCCTC- |
| | | TTTTTTTTcagccaactccaaTTTTTTTT- |
| | | GAGGACCCGATCTTTACCTTCAGG |
| ONECUT1 | 1310 | g-CGCCGCGACCTAGG-GTTTTAGAGCTA- |
| | | CCTGAAGGTAAAGATCGGGTCCTC- |
| | | TTTTTTTTcagccaactccaaTTTTTTTT- |
| | | GAGGACCCGATCTTTACCTTCAGG |
| ONECUT1 | 1311 | -GCGCTGGATGGCCA-GTTTTAGAGCTA- |
| | | CCTGAAGGTAAAGATCGGGTCCTC- |
| | | TTTTTTTTcagccaactccaaTTTTTTTT- |
| | | GAGGACCCGATCTTTACCTTCAGG |
| ONECUT1 | 1312 | -GCCGCTGCAATCCC-GTTTTAGAGCTA- |
| | | CCTGAAGGTAAAGATCGGGTCCTC- |
| | | TTTTTTTTcagccaactccaaTTTTTTTT- |
| | | GAGGACCCGATCTTTACCTTCAGG |
| ONECUT1 | 1313 | g-CGGCTACCGAACCG-GTTTTAGAGCTA- |
| | | CCTGGTTATAGCGGACGCACTGT- |
| | | TTTTTTTTcagccaactccaaTTTTTTTT- |
| | | ACAGTGCGTCCGCTATAACCAGG |
| ONECUT1 | 1314 | g-CGCCGCGACCTAGG-GTTTTAGAGCTA- |
| | | CCTGGTTATAGCGGACGCACTGT- |
| | | TTTTTTTTcagccaactccaaTTTTTTTT- |
| | | ACAGTGCGTCCGCTATAACCAGG |
| ONECUT1 | 1315 | -GCGCTGGATGGCCA-GTTTTAGAGCTA- |
| | | CCTGGTTATAGCGGACGCACTGT- |
| | | TTTTTTTTcagccaactccaaTTTTTTTT- |
| | | ACAGTGCGTCCGCTATAACCAGG |
| ONECUT1 | 1316 | -GCCGCTGCAATCCC-GTTTTAGAGCTA- |
| | | CCTGGTTATAGCGGACGCACTGT- |
| | | TTTTTTTTcagccaactccaaTTTTTTTT- |
| | | ACAGTGCGTCCGCTATAACCAGG |
| ONECUT1 | 1317 | g-CGGCTACCGAACCG-GTTTTAGAGCTA- |
| | | CCGCATCGTATTATCTGCGAAGC- |
| | | TTTTTTTTcagccaactccaaTTTTTTTT- |
| | | GCTTCGCAGATAATACGATGCGG |
| ONECUT1 | 1318 | g-CGCCGCGACCTAGG-GTTTTAGAGCTA- |
| | | CCGCATCGTATTATCTGCGAAGC- |
| | | TTTTTTTTcagccaactccaaTTTTTTTT- |
| | | GCTTCGCAGATAATACGATGCGG |
| ONECUT1 | 1319 | -GCGCTGGATGGCCA-GTTTTAGAGCTA- |
| | | CCGCATCGTATTATCTGCGAAGC- |
| | | TTTTTTTTcagccaactccaaTTTTTTTT- |
| | | GCTTCGCAGATAATACGATGCGG |
| ONECUT1 | 1320 | -GCCGCTGCAATCCC-GTTTTAGAGCTA- |
| | | CCGCATCGTATTATCTGCGAAGC- |
| | | TTTTTTTTcagccaactccaaTTTTTTTT- |
| | | GCTTCGCAGATAATACGATGCGG |
| ONECUT1 | 1321 | g-CGGCTACCGAACCG-GTTTTAGAGCTA- |
| | | CCGCTAGGACGTTCAACGGAGTC- |
| | | TTTTTTTTcagccaactccaaTTTTTTTT- |
| | | GACTCCGTTGAACGTCCTAGCGG |
| ONECUT1 | 1322 | g-CGCCGCGACCTAGG-GTTTTAGAGCTA- |
| | | CCGCTAGGACGTTCAACGGAGTC- |
| | | TTTTTTTTcagccaactccaaTTTTTTTT- |
| | | GACTCCGTTGAACGTCCTAGCGG |
| ONECUT1 | 1323 | -GCGCTGGATGGCCA-GTTTTAGAGCTA- |
| | | CCGCTAGGACGTTCAACGGAGTC- |
| | | TTTTTTTTcagccaactccaaTTTTTTTT- |
| | | GACTCCGTTGAACGTCCTAGCGG |
| ONECUT1 | 1324 | -GCCGCTGCAATCCC-GTTTTAGAGCTA- |
| | | CCGCTAGGACGTTCAACGGAGTC- |
| | | TTTTTTTTcagccaactccaaTTTTTTTT- |
| | | GACTCCGTTGAACGTCCTAGCGG |
| ONECUT1 | 1325 | g-CGGCTACCGAACCG-GTTTTAGAGCTA- |
| | | CCATAGCGGTACTATCGGCATCT- |
| | | TTTTTTTTcagccaactccaaTTTTTTTT- |
| | | AGATGCCGATAGTACCGCTATGG |
| ONECUT1 | 1326 | g-CGCCGCGACCTAGG-GTTTTAGAGCTA- |
| | | CCATAGCGGTACTATCGGCATCT- |
| | | TTTTTTTTcagccaactccaaTTTTTTTT- |
| | | AGATGCCGATAGTACCGCTATGG |
| ONECUT1 | 1327 | -GCGCTGGATGGCCA-GTTTTAGAGCTA- |
| | | CCATAGCGGTACTATCGGCATCT- |
| | | TTTTTTTTcagccaactccaaTTTTTTTT- |
| | | AGATGCCGATAGTACCGCTATGG |
| ONECUT1 | 1328 | -GCCGCTGCAATCCC-GTTTTAGAGCTA- |
| | | CCATAGCGGTACTATCGGCATCT- |
| | | TTTTTTTTcagccaactccaaTTTTTTTT- |
| | | AGATGCCGATAGTACCGCTATGG |
| ONECUT1 | 1329 | g-CGGCTACCGAACCG-GTTTTAGAGCTA- |
| | | CCTCGTACTAGTCTCGCATGACC- |
| | | TTTTTTTTcagccaactccaaTTTTTTTT- |
| | | GGTCATGCGAGACTAGTACGAGG |
| ONECUT1 | 1330 | g-CGCCGCGACCTAGG-GTTTTAGAGCTA- |
| | | CCTCGTACTAGTCTCGCATGACC- |
| | | TTTTTTTTcagccaactccaaTTTTTTTT- |
| | | GGTCATGCGAGACTAGTACGAGG |
| ONECUT1 | 1331 | -GCGCTGGATGGCCA-GTTTTAGAGCTA- |
| | | CCTCGTACTAGTCTCGCATGACC- |
| | | TTTTTTTTcagccaactccaaTTTTTTTT- |
| | | GGTCATGCGAGACTAGTACGAGG |
| ONECUT1 | 1332 | -GCCGCTGCAATCCC-GTTTTAGAGCTA- |
| | | CCTCGTACTAGTCTCGCATGACC- |
| | | TTTTTTTTcagccaactccaaTTTTTTTT- |
| | | GGTCATGCGAGACTAGTACGAGG |
| ONECUT1 | 1333 | g-CGGCTACCGAACCG-GTTTTAGAGCTA- |
| | | CCGATAGTGCTAAACGACGCTTT- |
| | | TTTTTTTTcagccaactccaaTTTTTTTT- |
| | | AAAGCGTCGTTTAGCACTATCGG |
| ONECUT1 | 1334 | g-CGCCGCGACCTAGG-GTTTTAGAGCTA- |
| | | CCGATAGTGCTAAACGACGCTTT- |
| | | TTTTTTTTcagccaactccaaTTTTTTTT- |
| | | AAAGCGTCGTTTAGCACTATCGG |
| ONECUT1 | 1335 | -GCGCTGGATGGCCA-GTTTTAGAGCTA- |
| | | CCGATAGTGCTAAACGACGCTTT- |
| | | TTTTTTTTcagccaactccaaTTTTTTTT- |
| | | AAAGCGTCGTTTAGCACTATCGG |
| ONECUT1 | 1336 | -GCCGCTGCAATCCC-GTTTTAGAGCTA- |
| | | CCGATAGTGCTAAACGACGCTTT- |
| | | TTTTTTTTcagccaactccaaTTTTTTTT- |
| | | AAAGCGTCGTTTAGCACTATCGG |
| ONECUT1 | 1337 | g-CGGCTACCGAACCG-GTTTTAGAGCTA- |
| | | CCCGTTATCGACGTTCAAGGAAC- |
| | | TTTTTTTTcagccaactccaaTTTTTTTT- |
| | | GTTCCTTGAACGTCGATAACGGG |
| ONECUT1 | 1338 | g-CGCCGCGACCTAGG-GTTTTAGAGCTA- |
| | | CCCGTTATCGACGTTCAAGGAAC- |
| | | TTTTTTTTcagccaactccaaTTTTTTTT- |
| | | GTTCCTTGAACGTCGATAACGGG |
| ONECUT1 | 1339 | -GCGCTGGATGGCCA-GTTTTAGAGCTA- |
| | | CCCGTTATCGACGTTCAAGGAAC- |
| | | TTTTTTTTcagccaactccaaTTTTTTTT- |
| | | GTTCCTTGAACGTCGATAACGGG |
| ONECUT1 | 1340 | -GCCGCTGCAATCCC-GTTTTAGAGCTA- |
| | | CCCGTTATCGACGTTCAAGGAAC- |
| | | TTTTTTTTcagccaactccaaTTTTTTTT- |
| | | GTTCCTTGAACGTCGATAACGGG |
| ONECUT1 | 1341 | g-CGGCTACCGAACCG-GTTTTAGAGCTA- |
| | | CCGATCAATGCGGTCTGCGTAAC- |
| | | TTTTTTTTcagccaactccaaTTTTTTTT- |
| | | GTTACGCAGACCGCATTGATCGG |
| ONECUT1 | 1342 | g-CGCCGCGACCTAGG-GTTTTAGAGCTA- |
| | | CCGATCAATGCGGTCTGCGTAAC- |
| | | TTTTTTTTcagccaactccaaTTTTTTTT- |
| | | GTTACGCAGACCGCATTGATCGG |
| ONECUT1 | 1343 | -GCGCTGGATGGCCA-GTTTTAGAGCTA- |
| | | CCGATCAATGCGGTCTGCGTAAC- |
| | | TTTTTTTTcagccaactccaaTTTTTTTT- |
| | | GTTACGCAGACCGCATTGATCGG |
| ONECUT1 | 1344 | -GCCGCTGCAATCCC-GTTTTAGAGCTA- |
| | | CCGATCAATGCGGTCTGCGTAAC- |
| | | TTTTTTTTcagccaactccaaTTTTTTTT- |
| | | GTTACGCAGACCGCATTGATCGG |
| ONECUT1 | 1345 | g-CGGCTACCGAACCG-GTTTTAGAGCTA- |
| | | CCCTTACTCGCGATACTCTCGAC- |
| | | TTTTTTTTcagccaactccaaTTTTTTTT- |
| | | GTCGAGAGTATCGCGAGTAAGGG |
| ONECUT1 | 1346 | g-CGCCGCGACCTAGG-GTTTTAGAGCTA- |
| | | CCCTTACTCGCGATACTCTCGAC- |
| | | TTTTTTTTcagccaactccaaTTTTTTTT- |
| | | GTCGAGAGTATCGCGAGTAAGGG |
| ONECUT1 | 1347 | -GCGCTGGATGGCCA-GTTTTAGAGCTA- |
| | | CCCTTACTCGCGATACTCTCGAC- |
| | | TTTTTTTTcagccaactccaaTTTTTTTT- |
| | | GTCGAGAGTATCGCGAGTAAGGG |
| ONECUT1 | 1348 | -GCCGCTGCAATCCC-GTTTTAGAGCTA- |
| | | CCCTTACTCGCGATACTCTCGAC- |
| | | TTTTTTTTcagccaactccaaTTTTTTTT- |
| | | GTCGAGAGTATCGCGAGTAAGGG |
| ONECUT1 | 1349 | g-CGGCTACCGAACCG-GTTTTAGAGCTA- |
| | | CCGCGGACGGTAAGCACGGAATA- |
| | | TTTTTTTTcagccaactccaaTTTTTTTT- |
| | | TATTCCGTGCTTACCGTCCGCGG |
| ONECUT1 | 1350 | g-CGCCGCGACCTAGG-GTTTTAGAGCTA- |
| | | CCGCGGACGGTAAGCACGGAATA- |
| | | TTTTTTTTcagccaactccaaTTTTTTTT- |
| | | TATTCCGTGCTTACCGTCCGCGG |
| ONECUT1 | 1351 | -GCGCTGGATGGCCA-GTTTTAGAGCTA- |
| | | CCGCGGACGGTAAGCACGGAATA- |
| | | TTTTTTTTcagccaactccaaTTTTTTTT- |
| | | TATTCCGTGCTTACCGTCCGCGG |
| ONECUT1 | 1352 | -GCCGCTGCAATCCC-GTTTTAGAGCTA- |
| | | CCGCGGACGGTAAGCACGGAATA- |
| | | TTTTTTTTcagccaactccaaTTTTTTTT- |
| | | TATTCCGTGCTTACCGTCCGCGG |
| ONECUT1 | 1353 | g-CGGCTACCGAACCG-GTTTTAGAGCTA- |
| | | CCTATAGTCACGAATCGTAGGGT- |
| | | TTTTTTTTcagccaactccaaTTTTTTTT- |
| | | ACCCTACGATTCGTGACTATAGG |
| ONECUT1 | 1354 | g-CGCCGCGACCTAGG-GTTTTAGAGCTA- |
| | | CCTATAGTCACGAATCGTAGGGT- |
| | | TTTTTTTTcagccaactccaaTTTTTTTT- |
| | | ACCCTACGATTCGTGACTATAGG |
| ONECUT1 | 1355 | -GCGCTGGATGGCCA-GTTTTAGAGCTA- |
| | | CCTATAGTCACGAATCGTAGGGT- |
| | | TTTTTTTTcagccaactccaaTTTTTTTT- |
| | | ACCCTACGATTCGTGACTATAGG |
| ONECUT1 | 1356 | -GCCGCTGCAATCCC-GTTTTAGAGCTA- |
| | | CCTATAGTCACGAATCGTAGGGT- |
| | | TTTTTTTTcagccaactccaaTTTTTTTT- |
| | | ACCCTACGATTCGTGACTATAGG |
| ONECUT1 | 1357 | g-CGGCTACCGAACCG-GTTTTAGAGCTA- |
| | | CCCGTCGTCACGTATGCGTAGCA- |
| | | TTTTTTTTcagccaactccaaTTTTTTTT- |
| | | TGCTACGCATACGTGACGACGGG |
| ONECUT1 | 1358 | g-CGCCGCGACCTAGG-GTTTTAGAGCTA- |
| | | CCCGTCGTCACGTATGCGTAGCA- |
| | | TTTTTTTTcagccaactccaaTTTTTTTT- |
| | | TGCTACGCATACGTGACGACGGG |
| ONECUT1 | 1359 | -GCGCTGGATGGCCA-GTTTTAGAGCTA- |
| | | CCCGTCGTCACGTATGCGTAGCA- |
| | | TTTTTTTTcagccaactccaaTTTTTTTT- |
| | | TGCTACGCATACGTGACGACGGG |
| ONECUT1 | 1360 | -GCCGCTGCAATCCC-GTTTTAGAGCTA- |
| | | CCCGTCGTCACGTATGCGTAGCA- |
| | | TTTTTTTTcagccaactccaaTTTTTTTT- |
| | | TGCTACGCATACGTGACGACGGG |
| ONECUT1 | 1361 | g-CGGCTACCGAACCG-GTTTTAGAGCTA- |
| | | CCCGAGAGGTAGTAGACGACGCA- |
| | | TTTTTTTTcagccaactccaaTTTTTTTT- |
| | | TGCGTCGTCTACTACCTCTCGGG |
| ONECUT1 | 1362 | g-CGCCGCGACCTAGG-GTTTTAGAGCTA- |
| | | CCCGAGAGGTAGTAGACGACGCA- |
| | | TTTTTTTTcagccaactccaaTTTTTTTT- |
| | | TGCGTCGTCTACTACCTCTCGGG |
| ONECUT1 | 1363 | -GCGCTGGATGGCCA-GTTTTAGAGCTA- |
| | | CCCGAGAGGTAGTAGACGACGCA- |
| | | TTTTTTTTcagccaactccaaTTTTTTTT- |
| | | TGCGTCGTCTACTACCTCTCGGG |
| ONECUT1 | 1364 | -GCCGCTGCAATCCC-GTTTTAGAGCTA- |
| | | CCCGAGAGGTAGTAGACGACGCA- |
| | | TTTTTTTTcagccaactccaaTTTTTTTT- |
| | | TGCGTCGTCTACTACCTCTCGGG |
| ONECUT1 | 1365 | g-CGGCTACCGAACCG-GTTTTAGAGCTA- |
| | | CCGACGTCTACGGACGGGAGCTA- |
| | | TTTTTTTTcagccaactccaaTTTTTTTT- |
| | | TAGCTCCCGTCCGTAGACGTCGG |
| ONECUT1 | 1366 | g-CGCCGCGACCTAGG-GTTTTAGAGCTA- |
| | | CCGACGTCTACGGACGGGAGCTA- |
| | | TTTTTTTTcagccaactccaaTTTTTTTT- |
| | | TAGCTCCCGTCCGTAGACGTCGG |
| ONECUT1 | 1367 | -GCGCTGGATGGCCA-GTTTTAGAGCTA- |
| | | CCGACGTCTACGGACGGGAGCTA- |
| | | TTTTTTTTcagccaactccaaTTTTTTTT- |
| | | TAGCTCCCGTCCGTAGACGTCGG |
| ONECUT1 | 1368 | -GCCGCTGCAATCCC-GTTTTAGAGCTA- |
| | | CCGACGTCTACGGACGGGAGCTA- |
| | | TTTTTTTTcagccaactccaaTTTTTTTT- |
| | | TAGCTCCCGTCCGTAGACGTCGG |
| ONECUT1 | 1369 | g-CGGCTACCGAACCG-GTTTTAGAGCTA- |
| | | CCAAAGCTCATTCGCGACTGAGC- |
| | | TTTTTTTTcagccaactccaaTTTTTTTT- |
| | | GCTCAGTCGCGAATGAGCTTTGG |
| ONECUT1 | 1370 | g-CGCCGCGACCTAGG-GTTTTAGAGCTA- |
| | | CCAAAGCTCATTCGCGACTGAGC- |
| | | TTTTTTTTcagccaactccaaTTTTTTTT- |
| | | GCTCAGTCGCGAATGAGCTTTGG |
| ONECUT1 | 1371 | -GCGCTGGATGGCCA-GTTTTAGAGCTA- |
| | | CCAAAGCTCATTCGCGACTGAGC- |
| | | TTTTTTTTcagccaactccaaTTTTTTTT- |
| | | GCTCAGTCGCGAATGAGCTTTGG |
| ONECUT1 | 1372 | -GCCGCTGCAATCCC-GTTTTAGAGCTA- |
| | | CCAAAGCTCATTCGCGACTGAGC- |
| | | TTTTTTTTcagccaactccaaTTTTTTTT- |
| | | GCTCAGTCGCGAATGAGCTTTGG |
| ONECUT1 | 1373 | g-CGGCTACCGAACCG-GTTTTAGAGCTA- |
| | | CCATGGCACGATCGACACGGAGG- |
| | | TTTTTTTTcagccaactccaaTTTTTTTT- |
| | | CCTCCGTGTCGATCGTGCCATGG |
| ONECUT1 | 1374 | g-CGCCGCGACCTAGG-GTTTTAGAGCTA- |
| | | CCATGGCACGATCGACACGGAGG- |
| | | TTTTTTTTcagccaactccaaTTTTTTTT- |
| | | CCTCCGTGTCGATCGTGCCATGG |
| ONECUT1 | 1375 | -GCGCTGGATGGCCA-GTTTTAGAGCTA- |
| | | CCATGGCACGATCGACACGGAGG- |
| | | TTTTTTTTcagccaactccaaTTTTTTTT- |
| | | CCTCCGTGTCGATCGTGCCATGG |
| ONECUT1 | 1376 | -GCCGCTGCAATCCC-GTTTTAGAGCTA- |
| | | CCATGGCACGATCGACACGGAGG- |
| | | TTTTTTTTcagccaactccaaTTTTTTTT- |
| | | CCTCCGTGTCGATCGTGCCATGG |
| ONECUT1 | 1377 | g-CGGCTACCGAACCG-GTTTTAGAGCTA- |
| | | CCCGAACTCTCTATCGAACGAGT- |
| | | TTTTTTTTcagccaactccaaTTTTTTTT- |
| | | ACTCGTTCGATAGAGAGTTCGGG |
| ONECUT1 | 1378 | g-CGCCGCGACCTAGG-GTTTTAGAGCTA- |
| | | CCCGAACTCTCTATCGAACGAGT- |
| | | TTTTTTTTcagccaactccaaTTTTTTTT- |
| | | ACTCGTTCGATAGAGAGTTCGGG |
| ONECUT1 | 1379 | -GCGCTGGATGGCCA-GTTTTAGAGCTA- |
| | | CCCGAACTCTCTATCGAACGAGT- |
| | | TTTTTTTTcagccaactccaaTTTTTTTT- |
| | | ACTCGTTCGATAGAGAGTTCGGG |
| ONECUT1 | 1380 | -GCCGCTGCAATCCC-GTTTTAGAGCTA- |
| | | CCCGAACTCTCTATCGAACGAGT- |
| | | TTTTTTTTcagccaactccaaTTTTTTTT- |
| | | ACTCGTTCGATAGAGAGTTCGGG |
| PDX1 | 1381 | g-CTGGCCGCACTAAG-GTTTTAGAGCTA- |
| | | CCGTCGTTGTACCGTCTACTTGAC- |
| | | TTTTTTTTcagccaactccaaTTTTTTTT- |
| | | GTCAAGTAGACGGTACAACGACGG |
| PDX1 | 1382 | -GTGCTCCCCAAAAT-GTTTTAGAGCTA- |
| | | CCGTCGTTGTACCGTCTACTTGAC- |
| | | TTTTTTTTcagccaactccaaTTTTTTTT- |
| | | GTCAAGTAGACGGTACAACGACGG |
| PDX1 | 1383 | -GCACTGATCTCAGA-GTTTTAGAGCTA- |
| | | CCGTCGTTGTACCGTCTACTTGAC- |
| | | TTTTTTTTcagccaactccaaTTTTTTTT- |
| | | GTCAAGTAGACGGTACAACGACGG |
| PDX1 | 1384 | g-CACGTGGGGCCCCG-GTTTTAGAGCTA- |
| | | CCGTCGTTGTACCGTCTACTTGAC- |
| | | TTTTTTTTcagccaactccaaTTTTTTTT- |
| | | GTCAAGTAGACGGTACAACGACGG |
| PDX1 | 1385 | g-CTGGCCGCACTAAG-GTTTTAGAGCTA- |
| | | CCTACACTCGACATCGGTAGCTA- |
| | | TTTTTTTTcagccaactccaaTTTTTTTT- |
| | | TAGCTACCGATGTCGAGTGTAGG |
| PDX1 | 1386 | -GTGCTCCCCAAAAT-GTTTTAGAGCTA- |
| | | CCTACACTCGACATCGGTAGCTA- |
| | | TTTTTTTTcagccaactccaaTTTTTTTT- |
| | | TAGCTACCGATGTCGAGTGTAGG |
| PDX1 | 1387 | -GCACTGATCTCAGA-GTTTTAGAGCTA- |
| | | CCTACACTCGACATCGGTAGCTA- |
| | | TTTTTTTTcagccaactccaaTTTTTTTT- |
| | | TAGCTACCGATGTCGAGTGTAGG |
| PDX1 | 1388 | g-CACGTGGGGCCCCG-GTTTTAGAGCTA- |
| | | CCTACACTCGACATCGGTAGCTA- |
| | | TTTTTTTTcagccaactccaaTTTTTTTT- |
| | | TAGCTACCGATGTCGAGTGTAGG |
| PDX1 | 1389 | g-CTGGCCGCACTAAG-GTTTTAGAGCTA- |
| | | CCCTGGCGGAACGTTCGAGTAAT- |
| | | TTTTTTTTcagccaactccaaTTTTTTTT- |
| | | ATTACTCGAACGTTCCGCCAGGG |
| PDX1 | 1390 | -GTGCTCCCCAAAAT-GTTTTAGAGCTA- |
| | | CCCTGGCGGAACGTTCGAGTAAT- |
| | | TTTTTTTTcagccaactccaaTTTTTTTT- |
| | | ATTACTCGAACGTTCCGCCAGGG |
| PDX1 | 1391 | -GCACTGATCTCAGA-GTTTTAGAGCTA- |
| | | CCCTGGCGGAACGTTCGAGTAAT- |
| | | TTTTTTTTcagccaactccaaTTTTTTTT- |
| | | ATTACTCGAACGTTCCGCCAGGG |
| PDX1 | 1392 | g-CACGTGGGGCCCCG-GTTTTAGAGCTA- |
| | | CCCTGGCGGAACGTTCGAGTAAT- |
| | | TTTTTTTTcagccaactccaaTTTTTTTT- |
| | | ATTACTCGAACGTTCCGCCAGGG |
| PDX1 | 1393 | g-CTGGCCGCACTAAG-GTTTTAGAGCTA- |
| | | CCTACACGATAGTGGTCGTGCGC- |
| | | TTTTTTTTcagccaactccaaTTTTTTTT- |
| | | GCGCACGACCACTATCGTGTAGG |
| PDX1 | 1394 | -GTGCTCCCCAAAAT-GTTTTAGAGCTA- |
| | | CCTACACGATAGTGGTCGTGCGC- |
| | | TTTTTTTTcagccaactccaaTTTTTTTT- |
| | | GCGCACGACCACTATCGTGTAGG |
| PDX1 | 1395 | -GCACTGATCTCAGA-GTTTTAGAGCTA- |
| | | CCTACACGATAGTGGTCGTGCGC- |
| | | TTTTTTTTcagccaactccaaTTTTTTTT- |
| | | GCGCACGACCACTATCGTGTAGG |
| PDX1 | 1396 | g-CACGTGGGGCCCCG-GTTTTAGAGCTA- |
| | | CCTACACGATAGTGGTCGTGCGC- |
| | | TTTTTTTTcagccaactccaaTTTTTTTT- |
| | | GCGCACGACCACTATCGTGTAGG |
| PDX1 | 1397 | g-CTGGCCGCACTAAG-GTTTTAGAGCTA- |
| | | CCTTCCCGACTTCCGTAGGAGCGC- |
| | | TTTTTTTTcagccaactccaaTTTTTTTT- |
| | | GCGCTCCTACGGAAGTCGGGAAGG |
| PDX1 | 1398 | -GTGCTCCCCAAAAT-GTTTTAGAGCTA- |
| | | CCTTCCCGACTTCCGTAGGAGCGC- |
| | | TTTTTTTTcagccaactccaaTTTTTTTT- |
| | | GCGCTCCTACGGAAGTCGGGAAGG |
| PDX1 | 1399 | -GCACTGATCTCAGA-GTTTTAGAGCTA- |
| | | CCTTCCCGACTTCCGTAGGAGCGC- |
| | | TTTTTTTTcagccaactccaaTTTTTTTT- |
| | | GCGCTCCTACGGAAGTCGGGAAGG |
| PDX1 | 1400 | g-CACGTGGGGCCCCG-GTTTTAGAGCTA- |
| | | CCTTCCCGACTTCCGTAGGAGCGC- |
| | | TTTTTTTTcagccaactccaaTTTTTTTT- |
| | | GCGCTCCTACGGAAGTCGGGAAGG |
| PDX1 | 1401 | g-CTGGCCGCACTAAG-GTTTTAGAGCTA- |
| | | CCTGAAGGTAAAGATCGGGTCCTC- |
| | | TTTTTTTTcagccaactccaaTTTTTTTT- |
| | | GAGGACCCGATCTTTACCTTCAGG |
| PDX1 | 1402 | -GTGCTCCCCAAAAT-GTTTTAGAGCTA- |
| | | CCTGAAGGTAAAGATCGGGTCCTC- |
| | | TTTTTTTTcagccaactccaaTTTTTTTT- |
| | | GAGGACCCGATCTTTACCTTCAGG |
| PDX1 | 1403 | -GCACTGATCTCAGA-GTTTTAGAGCTA- |
| | | CCTGAAGGTAAAGATCGGGTCCTC- |
| | | TTTTTTTTcagccaactccaaTTTTTTTT- |
| | | GAGGACCCGATCTTTACCTTCAGG |
| PDX1 | 1404 | g-CACGTGGGGCCCCG-GTTTTAGAGCTA- |
| | | CCTGAAGGTAAAGATCGGGTCCTC- |
| | | TTTTTTTTcagccaactccaaTTTTTTTT- |
| | | GAGGACCCGATCTTTACCTTCAGG |
| PDX1 | 1405 | g-CTGGCCGCACTAAG-GTTTTAGAGCTA- |
| | | CCTGGTTATAGCGGACGCACTGT- |
| | | TTTTTTTTcagccaactccaaTTTTTTTT- |
| | | ACAGTGCGTCCGCTATAACCAGG |
| PDX1 | 1406 | -GTGCTCCCCAAAAT-GTTTTAGAGCTA- |
| | | CCTGGTTATAGCGGACGCACTGT- |
| | | TTTTTTTTcagccaactccaaTTTTTTTT- |
| | | ACAGTGCGTCCGCTATAACCAGG |
| PDX1 | 1407 | -GCACTGATCTCAGA-GTTTTAGAGCTA- |
| | | CCTGGTTATAGCGGACGCACTGT- |
| | | TTTTTTTTcagccaactccaaTTTTTTTT- |
| | | ACAGTGCGTCCGCTATAACCAGG |
| PDX1 | 1408 | g-CACGTGGGGCCCCG-GTTTTAGAGCTA- |
| | | CCTGGTTATAGCGGACGCACTGT- |
| | | TTTTTTTTcagccaactccaaTTTTTTTT- |
| | | ACAGTGCGTCCGCTATAACCAGG |
| PDX1 | 1409 | g-CTGGCCGCACTAAG-GTTTTAGAGCTA- |
| | | CCGCATCGTATTATCTGCGAAGC- |
| | | TTTTTTTTcagccaactccaaTTTTTTTT- |
| | | GCTTCGCAGATAATACGATGCGG |
| PDX1 | 1410 | -GTGCTCCCCAAAAT-GTTTTAGAGCTA- |
| | | CCGCATCGTATTATCTGCGAAGC- |
| | | TTTTTTTTcagccaactccaaTTTTTTTT- |
| | | GCTTCGCAGATAATACGATGCGG |
| PDX1 | 1411 | -GCACTGATCTCAGA-GTTTTAGAGCTA- |
| | | CCGCATCGTATTATCTGCGAAGC- |
| | | TTTTTTTTcagccaactccaaTTTTTTTT- |
| | | GCTTCGCAGATAATACGATGCGG |
| PDX1 | 1412 | g-CACGTGGGGCCCCG-GTTTTAGAGCTA- |
| | | CCGCATCGTATTATCTGCGAAGC- |
| | | TTTTTTTTcagccaactccaaTTTTTTTT- |
| | | GCTTCGCAGATAATACGATGCGG |
| PDX1 | 1413 | g-CTGGCCGCACTAAG-GTTTTAGAGCTA- |
| | | CCGCTAGGACGTTCAACGGAGTC- |
| | | TTTTTTTTcagccaactccaaTTTTTTTT- |
| | | GACTCCGTTGAACGTCCTAGCGG |
| PDX1 | 1414 | -GTGCTCCCCAAAAT-GTTTTAGAGCTA- |
| | | CCGCTAGGACGTTCAACGGAGTC- |
| | | TTTTTTTTcagccaactccaaTTTTTTTT- |
| | | GACTCCGTTGAACGTCCTAGCGG |
| PDX1 | 1415 | -GCACTGATCTCAGA-GTTTTAGAGCTA- |
| | | CCGCTAGGACGTTCAACGGAGTC- |
| | | TTTTTTTTcagccaactccaaTTTTTTTT- |
| | | GACTCCGTTGAACGTCCTAGCGG |
| PDX1 | 1416 | g-CACGTGGGGCCCCG-GTTTTAGAGCTA- |
| | | CCGCTAGGACGTTCAACGGAGTC- |
| | | TTTTTTTTcagccaactccaaTTTTTTTT- |
| | | GACTCCGTTGAACGTCCTAGCGG |
| PDX1 | 1417 | g-CTGGCCGCACTAAG-GTTTTAGAGCTA- |
| | | CCATAGCGGTACTATCGGCATCT- |
| | | TTTTTTTTcagccaactccaaTTTTTTTT- |
| | | AGATGCCGATAGTACCGCTATGG |
| PDX1 | 1418 | -GTGCTCCCCAAAAT-GTTTTAGAGCTA- |
| | | CCATAGCGGTACTATCGGCATCT- |
| | | TTTTTTTTcagccaactccaaTTTTTTTT- |
| | | AGATGCCGATAGTACCGCTATGG |
| PDX1 | 1419 | -GCACTGATCTCAGA-GTTTTAGAGCTA- |
| | | CCATAGCGGTACTATCGGCATCT- |
| | | TTTTTTTTcagccaactccaaTTTTTTTT- |
| | | AGATGCCGATAGTACCGCTATGG |
| PDX1 | 1420 | g-CACGTGGGGCCCCG-GTTTTAGAGCTA- |
| | | CCATAGCGGTACTATCGGCATCT- |
| | | TTTTTTTTcagccaactccaaTTTTTTTT- |
| | | AGATGCCGATAGTACCGCTATGG |
| PDX1 | 1421 | g-CTGGCCGCACTAAG-GTTTTAGAGCTA- |
| | | CCTCGTACTAGTCTCGCATGACC- |
| | | TTTTTTTTcagccaactccaaTTTTTTTT- |
| | | GGTCATGCGAGACTAGTACGAGG |
| PDX1 | 1422 | -GTGCTCCCCAAAAT-GTTTTAGAGCTA- |
| | | CCTCGTACTAGTCTCGCATGACC- |
| | | TTTTTTTTcagccaactccaaTTTTTTTT- |
| | | GGTCATGCGAGACTAGTACGAGG |
| PDX1 | 1423 | -GCACTGATCTCAGA-GTTTTAGAGCTA- |
| | | CCTCGTACTAGTCTCGCATGACC- |
| | | TTTTTTTTcagccaactccaaTTTTTTTT- |
| | | GGTCATGCGAGACTAGTACGAGG |
| PDX1 | 1424 | g-CACGTGGGGCCCCG-GTTTTAGAGCTA- |
| | | CCTCGTACTAGTCTCGCATGACC- |
| | | TTTTTTTTcagccaactccaaTTTTTTTT- |
| | | GGTCATGCGAGACTAGTACGAGG |
| PDX1 | 1425 | g-CTGGCCGCACTAAG-GTTTTAGAGCTA- |
| | | CCGATAGTGCTAAACGACGCTTT- |
| | | TTTTTTTTcagccaactccaaTTTTTTTT- |
| | | AAAGCGTCGTTTAGCACTATCGG |
| PDX1 | 1426 | -GTGCTCCCCAAAAT-GTTTTAGAGCTA- |
| | | CCGATAGTGCTAAACGACGCTTT- |
| | | TTTTTTTTcagccaactccaaTTTTTTTT- |
| | | AAAGCGTCGTTTAGCACTATCGG |
| PDX1 | 1427 | -GCACTGATCTCAGA-GTTTTAGAGCTA- |
| | | CCGATAGTGCTAAACGACGCTTT- |
| | | TTTTTTTTcagccaactccaaTTTTTTTT- |
| | | AAAGCGTCGTTTAGCACTATCGG |
| PDX1 | 1428 | g-CACGTGGGGCCCCG-GTTTTAGAGCTA- |
| | | CCGATAGTGCTAAACGACGCTTT- |
| | | TTTTTTTTcagccaactccaaTTTTTTTT- |
| | | AAAGCGTCGTTTAGCACTATCGG |
| PDX1 | 1429 | g-CTGGCCGCACTAAG-GTTTTAGAGCTA- |
| | | CCCGTTATCGACGTTCAAGGAAC- |
| | | TTTTTTTTcagccaactccaaTTTTTTTT- |
| | | GTTCCTTGAACGTCGATAACGGG |
| PDX1 | 1430 | -GTGCTCCCCAAAAT-GTTTTAGAGCTA- |
| | | CCCGTTATCGACGTTCAAGGAAC- |
| | | TTTTTTTTcagccaactccaaTTTTTTTT- |
| | | GTTCCTTGAACGTCGATAACGGG |
| PDX1 | 1431 | -GCACTGATCTCAGA-GTTTTAGAGCTA- |
| | | CCCGTTATCGACGTTCAAGGAAC- |
| | | TTTTTTTTcagccaactccaaTTTTTTTT- |
| | | GTTCCTTGAACGTCGATAACGGG |
| PDX1 | 1432 | g-CACGTGGGGCCCCG-GTTTTAGAGCTA- |
| | | CCCGTTATCGACGTTCAAGGAAC- |
| | | TTTTTTTTcagccaactccaaTTTTTTTT- |
| | | GTTCCTTGAACGTCGATAACGGG |
| PDX1 | 1433 | g-CTGGCCGCACTAAG-GTTTTAGAGCTA- |
| | | CCGATCAATGCGGTCTGCGTAAC- |
| | | TTTTTTTTcagccaactccaaTTTTTTTT- |
| | | GTTACGCAGACCGCATTGATCGG |
| PDX1 | 1434 | -GTGCTCCCCAAAAT-GTTTTAGAGCTA- |
| | | CCGATCAATGCGGTCTGCGTAAC- |
| | | TTTTTTTTcagccaactccaaTTTTTTTT- |
| | | GTTACGCAGACCGCATTGATCGG |
| PDX1 | 1435 | -GCACTGATCTCAGA-GTTTTAGAGCTA- |
| | | CCGATCAATGCGGTCTGCGTAAC- |
| | | TTTTTTTTcagccaactccaaTTTTTTTT- |
| | | GTTACGCAGACCGCATTGATCGG |
| PDX1 | 1436 | g-CACGTGGGGCCCCG-GTTTTAGAGCTA- |
| | | CCGATCAATGCGGTCTGCGTAAC- |
| | | TTTTTTTTcagccaactccaaTTTTTTTT- |
| | | GTTACGCAGACCGCATTGATCGG |
| PDX1 | 1437 | g-CTGGCCGCACTAAG-GTTTTAGAGCTA- |
| | | CCCTTACTCGCGATACTCTCGAC- |
| | | TTTTTTTTcagccaactccaaTTTTTTTT- |
| | | GTCGAGAGTATCGCGAGTAAGGG |
| PDX1 | 1438 | -GTGCTCCCCAAAAT-GTTTTAGAGCTA- |
| | | CCCTTACTCGCGATACTCTCGAC- |
| | | TTTTTTTTcagccaactccaaTTTTTTTT- |
| | | GTCGAGAGTATCGCGAGTAAGGG |
| PDX1 | 1439 | -GCACTGATCTCAGA-GTTTTAGAGCTA- |
| | | CCCTTACTCGCGATACTCTCGAC- |
| | | TTTTTTTTcagccaactccaaTTTTTTTT- |
| | | GTCGAGAGTATCGCGAGTAAGGG |
| PDX1 | 1440 | g-CACGTGGGGCCCCG-GTTTTAGAGCTA- |
| | | CCCTTACTCGCGATACTCTCGAC- |
| | | TTTTTTTTcagccaactccaaTTTTTTTT- |
| | | GTCGAGAGTATCGCGAGTAAGGG |
| PDX1 | 1441 | g-CTGGCCGCACTAAG-GTTTTAGAGCTA- |
| | | CCGCGGACGGTAAGCACGGAATA- |
| | | TTTTTTTTcagccaactccaaTTTTTTTT- |
| | | TATTCCGTGCTTACCGTCCGCGG |
| PDX1 | 1442 | -GTGCTCCCCAAAAT-GTTTTAGAGCTA- |
| | | CCGCGGACGGTAAGCACGGAATA- |
| | | TTTTTTTTcagccaactccaaTTTTTTTT- |
| | | TATTCCGTGCTTACCGTCCGCGG |
| PDX1 | 1443 | -GCACTGATCTCAGA-GTTTTAGAGCTA- |
| | | CCGCGGACGGTAAGCACGGAATA- |
| | | TTTTTTTTcagccaactccaaTTTTTTTT- |
| | | TATTCCGTGCTTACCGTCCGCGG |
| PDX1 | 1444 | g-CACGTGGGGCCCCG-GTTTTAGAGCTA- |
| | | CCGCGGACGGTAAGCACGGAATA- |
| | | TTTTTTTTcagccaactccaaTTTTTTTT- |
| | | TATTCCGTGCTTACCGTCCGCGG |
| PDX1 | 1445 | g-CTGGCCGCACTAAG-GTTTTAGAGCTA- |
| | | CCTATAGTCACGAATCGTAGGGT- |
| | | TTTTTTTTcagccaactccaaTTTTTTTT- |
| | | ACCCTACGATTCGTGACTATAGG |
| PDX1 | 1446 | -GTGCTCCCCAAAAT-GTTTTAGAGCTA- |
| | | CCTATAGTCACGAATCGTAGGGT- |
| | | TTTTTTTTcagccaactccaaTTTTTTTT- |
| | | ACCCTACGATTCGTGACTATAGG |
| PDX1 | 1447 | -GCACTGATCTCAGA-GTTTTAGAGCTA- |
| | | CCTATAGTCACGAATCGTAGGGT- |
| | | TTTTTTTTcagccaactccaaTTTTTTTT- |
| | | ACCCTACGATTCGTGACTATAGG |
| PDX1 | 1448 | g-CACGTGGGGCCCCG-GTTTTAGAGCTA- |
| | | CCTATAGTCACGAATCGTAGGGT- |
| | | TTTTTTTTcagccaactccaaTTTTTTTT- |
| | | ACCCTACGATTCGTGACTATAGG |
| PDX1 | 1449 | g-CTGGCCGCACTAAG-GTTTTAGAGCTA- |
| | | CCCGTCGTCACGTATGCGTAGCA- |
| | | TTTTTTTTcagccaactccaaTTTTTTTT- |
| | | TGCTACGCATACGTGACGACGGG |
| PDX1 | 1450 | -GTGCTCCCCAAAAT-GTTTTAGAGCTA- |
| | | CCCGTCGTCACGTATGCGTAGCA- |
| | | TTTTTTTTcagccaactccaaTTTTTTTT- |
| | | TGCTACGCATACGTGACGACGGG |
| PDX1 | 1451 | -GCACTGATCTCAGA-GTTTTAGAGCTA- |
| | | CCCGTCGTCACGTATGCGTAGCA- |
| | | TTTTTTTTcagccaactccaaTTTTTTTT- |
| | | TGCTACGCATACGTGACGACGGG |
| PDX1 | 1452 | g-CACGTGGGGCCCCG-GTTTTAGAGCTA- |
| | | CCCGTCGTCACGTATGCGTAGCA- |
| | | TTTTTTTTcagccaactccaaTTTTTTTT- |
| | | TGCTACGCATACGTGACGACGGG |
| PDX1 | 1453 | g-CTGGCCGCACTAAG-GTTTTAGAGCTA- |
| | | CCCGAGAGGTAGTAGACGACGCA- |
| | | TTTTTTTTcagccaactccaaTTTTTTTT- |
| | | TGCGTCGTCTACTACCTCTCGGG |
| PDX1 | 1454 | -GTGCTCCCCAAAAT-GTTTTAGAGCTA- |
| | | CCCGAGAGGTAGTAGACGACGCA- |
| | | TTTTTTTTcagccaactccaaTTTTTTTT- |
| | | TGCGTCGTCTACTACCTCTCGGG |
| PDX1 | 1455 | -GCACTGATCTCAGA-GTTTTAGAGCTA- |
| | | CCCGAGAGGTAGTAGACGACGCA- |
| | | TTTTTTTTcagccaactccaaTTTTTTTT- |
| | | TGCGTCGTCTACTACCTCTCGGG |
| PDX1 | 1456 | g-CACGTGGGGCCCCG-GTTTTAGAGCTA- |
| | | CCCGAGAGGTAGTAGACGACGCA- |
| | | TTTTTTTTcagccaactccaaTTTTTTTT- |
| | | TGCGTCGTCTACTACCTCTCGGG |
| PDX1 | 1457 | g-CTGGCCGCACTAAG-GTTTTAGAGCTA- |
| | | CCGACGTCTACGGACGGGAGCTA- |
| | | TTTTTTTTcagccaactccaaTTTTTTTT- |
| | | TAGCTCCCGTCCGTAGACGTCGG |
| PDX1 | 1458 | -GTGCTCCCCAAAAT-GTTTTAGAGCTA- |
| | | CCGACGTCTACGGACGGGAGCTA- |
| | | TTTTTTTTcagccaactccaaTTTTTTTT- |
| | | TAGCTCCCGTCCGTAGACGTCGG |
| PDX1 | 1459 | -GCACTGATCTCAGA-GTTTTAGAGCTA- |
| | | CCGACGTCTACGGACGGGAGCTA- |
| | | TTTTTTTTcagccaactccaaTTTTTTTT- |
| | | TAGCTCCCGTCCGTAGACGTCGG |
| PDX1 | 1460 | g-CACGTGGGGCCCCG-GTTTTAGAGCTA- |
| | | CCGACGTCTACGGACGGGAGCTA- |
| | | TTTTTTTTcagccaactccaaTTTTTTTT- |
| | | TAGCTCCCGTCCGTAGACGTCGG |
| PDX1 | 1461 | g-CTGGCCGCACTAAG-GTTTTAGAGCTA- |
| | | CCAAAGCTCATTCGCGACTGAGC- |
| | | TTTTTTTTcagccaactccaaTTTTTTTT- |
| | | GCTCAGTCGCGAATGAGCTTTGG |
| PDX1 | 1462 | -GTGCTCCCCAAAAT-GTTTTAGAGCTA- |
| | | CCAAAGCTCATTCGCGACTGAGC- |
| | | TTTTTTTTcagccaactccaaTTTTTTTT- |
| | | GCTCAGTCGCGAATGAGCTTTGG |
| PDX1 | 1463 | -GCACTGATCTCAGA-GTTTTAGAGCTA- |
| | | CCAAAGCTCATTCGCGACTGAGC- |
| | | TTTTTTTTcagccaactccaaTTTTTTTT- |
| | | GCTCAGTCGCGAATGAGCTTTGG |
| PDX1 | 1464 | g-CACGTGGGGCCCCG-GTTTTAGAGCTA- |
| | | CCAAAGCTCATTCGCGACTGAGC- |
| | | TTTTTTTTcagccaactccaaTTTTTTTT- |
| | | GCTCAGTCGCGAATGAGCTTTGG |
| PDX1 | 1465 | g-CTGGCCGCACTAAG-GTTTTAGAGCTA- |
| | | CCATGGCACGATCGACACGGAGG- |
| | | TTTTTTTTcagccaactccaaTTTTTTTT- |
| | | CCTCCGTGTCGATCGTGCCATGG |
| PDX1 | 1466 | -GTGCTCCCCAAAAT-GTTTTAGAGCTA- |
| | | CCATGGCACGATCGACACGGAGG- |
| | | TTTTTTTTcagccaactccaaTTTTTTTT- |
| | | CCTCCGTGTCGATCGTGCCATGG |
| PDX1 | 1467 | -GCACTGATCTCAGA-GTTTTAGAGCTA- |
| | | CCATGGCACGATCGACACGGAGG- |
| | | TTTTTTTTcagccaactccaaTTTTTTTT- |
| | | CCTCCGTGTCGATCGTGCCATGG |
| PDX1 | 1468 | g-CACGTGGGGCCCCG-GTTTTAGAGCTA- |
| | | CCATGGCACGATCGACACGGAGG- |
| | | TTTTTTTTcagccaactccaaTTTTTTTT- |
| | | CCTCCGTGTCGATCGTGCCATGG |
| PDX1 | 1469 | g-CTGGCCGCACTAAG-GTTTTAGAGCTA- |
| | | CCCGAACTCTCTATCGAACGAGT- |
| | | TTTTTTTTcagccaactccaaTTTTTTTT- |
| | | ACTCGTTCGATAGAGAGTTCGGG |
| PDX1 | 1470 | -GTGCTCCCCAAAAT-GTTTTAGAGCTA- |
| | | CCCGAACTCTCTATCGAACGAGT- |
| | | TTTTTTTTcagccaactccaaTTTTTTTT- |
| | | ACTCGTTCGATAGAGAGTTCGGG |
| PDX1 | 1471 | -GCACTGATCTCAGA-GTTTTAGAGCTA- |
| | | CCCGAACTCTCTATCGAACGAGT- |
| | | TTTTTTTTcagccaactccaaTTTTTTTT- |
| | | ACTCGTTCGATAGAGAGTTCGGG |
| PDX1 | 1472 | g-CACGTGGGGCCCCG-GTTTTAGAGCTA- |
| | | CCCGAACTCTCTATCGAACGAGT- |
| | | TTTTTTTTcagccaactccaaTTTTTTTT- |
| | | ACTCGTTCGATAGAGAGTTCGGG |
| PTF1a | 1473 | g-CTGGCACGCGCCTA-GTTTTAGAGCTA- |
| | | CCGTCGTTGTACCGTCTACTTGAC- |
| | | TTTTTTTTcagccaactccaaTTTTTTTT- |
| | | GTCAAGTAGACGGTACAACGACGG |
| PTF1a | 1474 | -GCGCGGGTACGCAG-GTTTTAGAGCTA- |
| | | CCGTCGTTGTACCGTCTACTTGAC- |
| | | TTTTTTTTcagccaactccaaTTTTTTTT- |
| | | GTCAAGTAGACGGTACAACGACGG |
| PTF1a | 1475 | g-TGCCGGCGGCGAGG-GTTTTAGAGCTA- |
| | | CCGTCGTTGTACCGTCTACTTGAC- |
| | | TTTTTTTTcagccaactccaaTTTTTTTT- |
| | | GTCAAGTAGACGGTACAACGACGG |
| PTF1a | 1476 | g-CAGGAGCTCCCAAA-GTTTTAGAGCTA- |
| | | CCGTCGTTGTACCGTCTACTTGAC- |
| | | TTTTTTTTcagccaactccaaTTTTTTTT- |
| | | GTCAAGTAGACGGTACAACGACGG |
| PTF1a | 1477 | g-CTGGCACGCGCCTA-GTTTTAGAGCTA- |
| | | CCTACACTCGACATCGGTAGCTA- |
| | | TTTTTTTTcagccaactccaaTTTTTTTT- |
| | | TAGCTACCGATGTCGAGTGTAGG |
| PTF1a | 1478 | -GCGCGGGTACGCAG-GTTTTAGAGCTA- |
| | | CCTACACTCGACATCGGTAGCTA- |
| | | TTTTTTTTcagccaactccaaTTTTTTTT- |
| | | TAGCTACCGATGTCGAGTGTAGG |
| PTF1a | 1479 | g-TGCCGGCGGCGAGG-GTTTTAGAGCTA- |
| | | CCTACACTCGACATCGGTAGCTA- |
| | | TTTTTTTTcagccaactccaaTTTTTTTT- |
| | | TAGCTACCGATGTCGAGTGTAGG |
| PTF1a | 1480 | g-CAGGAGCTCCCAAA-GTTTTAGAGCTA- |
| | | CCTACACTCGACATCGGTAGCTA- |
| | | TTTTTTTTcagccaactccaaTTTTTTTT- |
| | | TAGCTACCGATGTCGAGTGTAGG |
| PTF1a | 1481 | g-CTGGCACGCGCCTA-GTTTTAGAGCTA- |
| | | CCCTGGCGGAACGTTCGAGTAAT- |
| | | TTTTTTTTcagccaactccaaTTTTTTTT- |
| | | ATTACTCGAACGTTCCGCCAGGG |
| PTF1a | 1482 | -GCGCGGGTACGCAG-GTTTTAGAGCTA- |
| | | CCCTGGCGGAACGTTCGAGTAAT- |
| | | TTTTTTTTcagccaactccaaTTTTTTTT- |
| | | ATTACTCGAACGTTCCGCCAGGG |
| PTF1a | 1483 | g-TGCCGGCGGCGAGG-GTTTTAGAGCTA- |
| | | CCCTGGCGGAACGTTCGAGTAAT- |
| | | TTTTTTTTcagccaactccaaTTTTTTTT- |
| | | ATTACTCGAACGTTCCGCCAGGG |
| PTFla | 1484 | g-CAGGAGCTCCCAAA-GTTTTAGAGCTA- |
| | | CCCTGGCGGAACGTTCGAGTAAT- |
| | | TTTTTTTTcagccaactccaaTTTTTTTT- |
| | | ATTACTCGAACGTTCCGCCAGGG |
| PTF1a | 1485 | g-CTGGCACGCGCCTA-GTTTTAGAGCTA- |
| | | CCTACACGATAGTGGTCGTGCGC- |
| | | TTTTTTTTcagccaactccaaTTTTTTTT- |
| | | GCGCACGACCACTATCGTGTAGG |
| PTF1a | 1486 | -GCGCGGGTACGCAG-GTTTTAGAGCTA- |
| | | CCTACACGATAGTGGTCGTGCGC- |
| | | TTTTTTTTcagccaactccaaTTTTTTTT- |
| | | GCGCACGACCACTATCGTGTAGG |
| PTF1a | 1487 | g-TGCCGGCGGCGAGG-GTTTTAGAGCTA- |
| | | CCTACACGATAGTGGTCGTGCGC- |
| | | TTTTTTTTcagccaactccaaTTTTTTTT- |
| | | GCGCACGACCACTATCGTGTAGG |
| PTF1a | 1488 | g-CAGGAGCTCCCAAA-GTTTTAGAGCTA- |
| | | CCTACACGATAGTGGTCGTGCGC- |
| | | TTTTTTTTcagccaactccaaTTTTTTTT- |
| | | GCGCACGACCACTATCGTGTAGG |
| PTF1a | 1489 | g-CTGGCACGCGCCTA-GTTTTAGAGCTA- |
| | | CCTTCCCGACTTCCGTAGGAGCGC- |
| | | TTTTTTTTcagccaactccaaTTTTTTTT- |
| | | GCGCTCCTACGGAAGTCGGGAAGG |
| PTF1a | 1490 | -GCGCGGGTACGCAG-GTTTTAGAGCTA- |
| | | CCTTCCCGACTTCCGTAGGAGCGC- |
| | | TTTTTTTTcagccaactccaaTTTTTTTT- |
| | | GCGCTCCTACGGAAGTCGGGAAGG |
| PTF1a | 1491 | g-TGCCGGCGGCGAGG-GTTTTAGAGCTA- |
| | | CCTTCCCGACTTCCGTAGGAGCGC- |
| | | TTTTTTTTcagccaactccaaTTTTTTTT- |
| | | GCGCTCCTACGGAAGTCGGGAAGG |
| PTF1a | 1492 | g-CAGGAGCTCCCAAA-GTTTTAGAGCTA- |
| | | CCTTCCCGACTTCCGTAGGAGCGC- |
| | | TTTTTTTTcagccaactccaaTTTTTTTT- |
| | | GCGCTCCTACGGAAGTCGGGAAGG |
| PTF1a | 1493 | g-CTGGCACGCGCCTA-GTTTTAGAGCTA- |
| | | CCTGAAGGTAAAGATCGGGTCCTC- |
| | | TTTTTTTTcagccaactccaaTTTTTTTT- |
| | | GAGGACCCGATCTTTACCTTCAGG |
| PTF1a | 1494 | -GCGCGGGTACGCAG-GTTTTAGAGCTA- |
| | | CCTGAAGGTAAAGATCGGGTCCTC- |
| | | TTTTTTTTcagccaactccaaTTTTTTTT- |
| | | GAGGACCCGATCTTTACCTTCAGG |
| PTF1a | 1495 | g-TGCCGGCGGCGAGG-GTTTTAGAGCTA- |
| | | CCTGAAGGTAAAGATCGGGTCCTC- |
| | | TTTTTTTTcagccaactccaaTTTTTTTT- |
| | | GAGGACCCGATCTTTACCTTCAGG |
| PTF1a | 1496 | g-CAGGAGCTCCCAAA-GTTTTAGAGCTA- |
| | | CCTGAAGGTAAAGATCGGGTCCTC- |
| | | TTTTTTTTcagccaactccaaTTTTTTTT- |
| | | GAGGACCCGATCTTTACCTTCAGG |
| PTF1a | 1497 | g-CTGGCACGCGCCTA-GTTTTAGAGCTA- |
| | | CCTGGTTATAGCGGACGCACTGT- |
| | | TTTTTTTTcagccaactccaaTTTTTTTT- |
| | | ACAGTGCGTCCGCTATAACCAGG |
| PTF1a | 1498 | -GCGCGGGTACGCAG-GTTTTAGAGCTA- |
| | | CCTGGTTATAGCGGACGCACTGT- |
| | | TTTTTTTTcagccaactccaaTTTTTTTT- |
| | | ACAGTGCGTCCGCTATAACCAGG |
| PTF1a | 1499 | g-TGCCGGCGGCGAGG-GTTTTAGAGCTA- |
| | | CCTGGTTATAGCGGACGCACTGT- |
| | | TTTTTTTTcagccaactccaaTTTTTTTT- |
| | | ACAGTGCGTCCGCTATAACCAGG |
| PTF1a | 1500 | g-CAGGAGCTCCCAAA-GTTTTAGAGCTA- |
| | | CCTGGTTATAGCGGACGCACTGT- |
| | | TTTTTTTTcagccaactccaaTTTTTTTT- |
| | | ACAGTGCGTCCGCTATAACCAGG |
| PTF1a | 1501 | g-CTGGCACGCGCCTA-GTTTTAGAGCTA- |
| | | CCGCATCGTATTATCTGCGAAGC- |
| | | TTTTTTTTcagccaactccaaTTTTTTTT- |
| | | GCTTCGCAGATAATACGATGCGG |
| PTF1a | 1502 | -GCGCGGGTACGCAG-GTTTTAGAGCTA- |
| | | CCGCATCGTATTATCTGCGAAGC- |
| | | TTTTTTTTcagccaactccaaTTTTTTTT- |
| | | GCTTCGCAGATAATACGATGCGG |
| PTF1a | 1503 | g-TGCCGGCGGCGAGG-GTTTTAGAGCTA- |
| | | CCGCATCGTATTATCTGCGAAGC- |
| | | TTTTTTTTcagccaactccaaTTTTTTTT- |
| | | GCTTCGCAGATAATACGATGCGG |
| PTF1a | 1504 | g-CAGGAGCTCCCAAA-GTTTTAGAGCTA- |
| | | CCGCATCGTATTATCTGCGAAGC- |
| | | TTTTTTTTcagccaactccaaTTTTTTTT- |
| | | GCTTCGCAGATAATACGATGCGG |
| PTF1a | 1505 | g-CTGGCACGCGCCTA-GTTTTAGAGCTA- |
| | | CCGCTAGGACGTTCAACGGAGTC- |
| | | TTTTTTTTcagccaactccaaTTTTTTTT- |
| | | GACTCCGTTGAACGTCCTAGCGG |
| PTF1a | 1506 | -GCGCGGGTACGCAG-GTTTTAGAGCTA- |
| | | CCGCTAGGACGTTCAACGGAGTC- |
| | | TTTTTTTTcagccaactccaaTTTTTTTT- |
| | | GACTCCGTTGAACGTCCTAGCGG |
| PTF1a | 1507 | g-TGCCGGCGGCGAGG-GTTTTAGAGCTA- |
| | | CCGCTAGGACGTTCAACGGAGTC- |
| | | TTTTTTTTcagccaactccaaTTTTTTTT- |
| | | GACTCCGTTGAACGTCCTAGCGG |
| PTF1a | 1508 | g-CAGGAGCTCCCAAA-GTTTTAGAGCTA- |
| | | CCGCTAGGACGTTCAACGGAGTC- |
| | | TTTTTTTTcagccaactccaaTTTTTTTT- |
| | | GACTCCGTTGAACGTCCTAGCGG |
| PTF1a | 1509 | g-CTGGCACGCGCCTA-GTTTTAGAGCTA- |
| | | CCATAGCGGTACTATCGGCATCT- |
| | | TTTTTTTTcagccaactccaaTTTTTTTT- |
| | | AGATGCCGATAGTACCGCTATGG |
| PTF1a | 1510 | -GCGCGGGTACGCAG-GTTTTAGAGCTA- |
| | | CCATAGCGGTACTATCGGCATCT- |
| | | TTTTTTTTcagccaactccaaTTTTTTTT- |
| | | AGATGCCGATAGTACCGCTATGG |
| PTF1a | 1511 | g-TGCCGGCGGCGAGG-GTTTTAGAGCTA- |
| | | CCATAGCGGTACTATCGGCATCT- |
| | | TTTTTTTTcagccaactccaaTTTTTTTT- |
| | | AGATGCCGATAGTACCGCTATGG |
| PTF1a | 1512 | g-CAGGAGCTCCCAAA-GTTTTAGAGCTA- |
| | | CCATAGCGGTACTATCGGCATCT- |
| | | TTTTTTTTcagccaactccaaTTTTTTTT- |
| | | AGATGCCGATAGTACCGCTATGG |
| PTF1a | 1513 | g-CTGGCACGCGCCTA-GTTTTAGAGCTA- |
| | | CCTCGTACTAGTCTCGCATGACC- |
| | | TTTTTTTTcagccaactccaaTTTTTTTT- |
| | | GGTCATGCGAGACTAGTACGAGG |
| PTF1a | 1514 | -GCGCGGGTACGCAG-GTTTTAGAGCTA- |
| | | CCTCGTACTAGTCTCGCATGACC- |
| | | TTTTTTTTcagccaactccaaTTTTTTTT- |
| | | GGTCATGCGAGACTAGTACGAGG |
| PTF1a | 1515 | g-TGCCGGCGGCGAGG-GTTTTAGAGCTA- |
| | | CCTCGTACTAGTCTCGCATGACC- |
| | | TTTTTTTTcagccaactccaaTTTTTTTT- |
| | | GGTCATGCGAGACTAGTACGAGG |
| PTF1a | 1516 | g-CAGGAGCTCCCAAA-GTTTTAGAGCTA- |
| | | CCTCGTACTAGTCTCGCATGACC- |
| | | TTTTTTTTcagccaactccaaTTTTTTTT- |
| | | GGTCATGCGAGACTAGTACGAGG |
| PTF1a | 1517 | g-CTGGCACGCGCCTA-GTTTTAGAGCTA- |
| | | CCGATAGTGCTAAACGACGCTTT- |
| | | TTTTTTTTcagccaactccaaTTTTTTTT- |
| | | AAAGCGTCGTTTAGCACTATCGG |
| PTF1a | 1518 | -GCGCGGGTACGCAG-GTTTTAGAGCTA- |
| | | CCGATAGTGCTAAACGACGCTTT- |
| | | TTTTTTTTcagccaactccaaTTTTTTTT- |
| | | AAAGCGTCGTTTAGCACTATCGG |
| PTF1a | 1519 | g-TGCCGGCGGCGAGG-GTTTTAGAGCTA- |
| | | CCGATAGTGCTAAACGACGCTTT- |
| | | TTTTTTTTcagccaactccaaTTTTTTTT- |
| | | AAAGCGTCGTTTAGCACTATCGG |
| PTF1a | 1520 | g-CAGGAGCTCCCAAA-GTTTTAGAGCTA- |
| | | CCGATAGTGCTAAACGACGCTTT- |
| | | TTTTTTTTcagccaactccaaTTTTTTTT- |
| | | AAAGCGTCGTTTAGCACTATCGG |
| PTF1a | 1521 | g-CTGGCACGCGCCTA-GTTTTAGAGCTA- |
| | | CCCGTTATCGACGTTCAAGGAAC- |
| | | TTTTTTTTcagccaactccaaTTTTTTTT- |
| | | GTTCCTTGAACGTCGATAACGGG |
| PTF1a | 1522 | -GCGCGGGTACGCAG-GTTTTAGAGCTA- |
| | | CCCGTTATCGACGTTCAAGGAAC- |
| | | TTTTTTTTcagccaactccaaTTTTTTTT- |
| | | GTTCCTTGAACGTCGATAACGGG |
| PTF1a | 1523 | g-TGCCGGCGGCGAGG-GTTTTAGAGCTA- |
| | | CCCGTTATCGACGTTCAAGGAAC- |
| | | TTTTTTTTcagccaactccaaTTTTTTTT- |
| | | GTTCCTTGAACGTCGATAACGGG |
| PTF1a | 1524 | g-CAGGAGCTCCCAAA-GTTTTAGAGCTA- |
| | | CCCGTTATCGACGTTCAAGGAAC- |
| | | TTTTTTTTcagccaactccaaTTTTTTTT- |
| | | GTTCCTTGAACGTCGATAACGGG |
| PTF1a | 1525 | g-CTGGCACGCGCCTA-GTTTTAGAGCTA- |
| | | CCGATCAATGCGGTCTGCGTAAC- |
| | | TTTTTTTTcagccaactccaaTTTTTTTT- |
| | | GTTACGCAGACCGCATTGATCGG |
| PTF1a | 1526 | -GCGCGGGTACGCAG-GTTTTAGAGCTA- |
| | | CCGATCAATGCGGTCTGCGTAAC- |
| | | TTTTTTTTcagccaactccaaTTTTTTTT- |
| | | GTTACGCAGACCGCATTGATCGG |
| PTF1a | 1527 | g-TGCCGGCGGCGAGG-GTTTTAGAGCTA- |
| | | CCGATCAATGCGGTCTGCGTAAC- |
| | | TTTTTTTTcagccaactccaaTTTTTTTT- |
| | | GTTACGCAGACCGCATTGATCGG |
| PTF1a | 1528 | g-CAGGAGCTCCCAAA-GTTTTAGAGCTA- |
| | | CCGATCAATGCGGTCTGCGTAAC- |
| | | TTTTTTTTcagccaactccaaTTTTTTTT- |
| | | GTTACGCAGACCGCATTGATCGG |
| PTF1a | 1529 | g-CTGGCACGCGCCTA-GTTTTAGAGCTA- |
| | | CCCTTACTCGCGATACTCTCGAC- |
| | | TTTTTTTTcagccaactccaaTTTTTTTT- |
| | | GTCGAGAGTATCGCGAGTAAGGG |
| PTF1a | 1530 | -GCGCGGGTACGCAG-GTTTTAGAGCTA- |
| | | CCCTTACTCGCGATACTCTCGAC- |
| | | TTTTTTTTcagccaactccaaTTTTTTTT- |
| | | GTCGAGAGTATCGCGAGTAAGGG |
| PTF1a | 1531 | g-TGCCGGCGGCGAGG-GTTTTAGAGCTA- |
| | | CCCTTACTCGCGATACTCTCGAC- |
| | | TTTTTTTTcagccaactccaaTTTTTTTT- |
| | | GTCGAGAGTATCGCGAGTAAGGG |
| PTFla | 1532 | g-CAGGAGCTCCCAAA-GTTTTAGAGCTA- |
| | | CCCTTACTCGCGATACTCTCGAC- |
| | | TTTTTTTTcagccaactccaaTTTTTTTT- |
| | | GTCGAGAGTATCGCGAGTAAGGG |
| PTF1a | 1533 | g-CTGGCACGCGCCTA-GTTTTAGAGCTA- |
| | | CCGCGGACGGTAAGCACGGAATA- |
| | | TTTTTTTTcagccaactccaaTTTTTTTT- |
| | | TATTCCGTGCTTACCGTCCGCGG |
| PTF1a | 1534 | -GCGCGGGTACGCAG-GTTTTAGAGCTA- |
| | | CCGCGGACGGTAAGCACGGAATA- |
| | | TTTTTTTTcagccaactccaaTTTTTTTT- |
| | | TATTCCGTGCTTACCGTCCGCGG |
| PTF1a | 1535 | g-TGCCGGCGGCGAGG-GTTTTAGAGCTA- |
| | | CCGCGGACGGTAAGCACGGAATA- |
| | | TTTTTTTTcagccaactccaaTTTTTTTT- |
| | | TATTCCGTGCTTACCGTCCGCGG |
| PTF1a | 1536 | g-CAGGAGCTCCCAAA-GTTTTAGAGCTA- |
| | | CCGCGGACGGTAAGCACGGAATA- |
| | | TTTTTTTTcagccaactccaaTTTTTTTT- |
| | | TATTCCGTGCTTACCGTCCGCGG |
| PTF1a | 1537 | g-CTGGCACGCGCCTA-GTTTTAGAGCTA- |
| | | CCTATAGTCACGAATCGTAGGGT- |
| | | TTTTTTTTcagccaactccaaTTTTTTTT- |
| | | ACCCTACGATTCGTGACTATAGG |
| PTF1a | 1538 | -GCGCGGGTACGCAG-GTTTTAGAGCTA- |
| | | CCTATAGTCACGAATCGTAGGGT- |
| | | TTTTTTTTcagccaactccaaTTTTTTTT- |
| | | ACCCTACGATTCGTGACTATAGG |
| PTF1a | 1539 | g-TGCCGGCGGCGAGG-GTTTTAGAGCTA- |
| | | CCTATAGTCACGAATCGTAGGGT- |
| | | TTTTTTTTcagccaactccaaTTTTTTTT- |
| | | ACCCTACGATTCGTGACTATAGG |
| PTF1a | 1540 | g-CAGGAGCTCCCAAA-GTTTTAGAGCTA- |
| | | CCTATAGTCACGAATCGTAGGGT- |
| | | TTTTTTTTcagccaactccaaTTTTTTTT- |
| | | ACCCTACGATTCGTGACTATAGG |
| PTF1a | 1541 | g-CTGGCACGCGCCTA-GTTTTAGAGCTA- |
| | | CCCGTCGTCACGTATGCGTAGCA- |
| | | TTTTTTTTcagccaactccaaTTTTTTTT- |
| | | TGCTACGCATACGTGACGACGGG |
| PTF1a | 1542 | -GCGCGGGTACGCAG-GTTTTAGAGCTA- |
| | | CCCGTCGTCACGTATGCGTAGCA- |
| | | TTTTTTTTcagccaactccaaTTTTTTTT- |
| | | TGCTACGCATACGTGACGACGGG |
| PTF1a | 1543 | g-TGCCGGCGGCGAGG-GTTTTAGAGCTA- |
| | | CCCGTCGTCACGTATGCGTAGCA- |
| | | TTTTTTTTcagccaactccaaTTTTTTTT- |
| | | TGCTACGCATACGTGACGACGGG |
| PTF1a | 1544 | g-CAGGAGCTCCCAAA-GTTTTAGAGCTA- |
| | | CCCGTCGTCACGTATGCGTAGCA- |
| | | TTTTTTTTcagccaactccaaTTTTTTTT- |
| | | TGCTACGCATACGTGACGACGGG |
| PTF1a | 1545 | g-CTGGCACGCGCCTA-GTTTTAGAGCTA- |
| | | CCCGAGAGGTAGTAGACGACGCA- |
| | | TTTTTTTTcagccaactccaaTTTTTTTT- |
| | | TGCGTCGTCTACTACCTCTCGGG |
| PTF1a | 1546 | -GCGCGGGTACGCAG-GTTTTAGAGCTA- |
| | | CCCGAGAGGTAGTAGACGACGCA- |
| | | TTTTTTTTcagccaactccaaTTTTTTTT- |
| | | TGCGTCGTCTACTACCTCTCGGG |
| PTF1a | 1547 | g-TGCCGGCGGCGAGG-GTTTTAGAGCTA- |
| | | CCCGAGAGGTAGTAGACGACGCA- |
| | | TTTTTTTTcagccaactccaaTTTTTTTT- |
| | | TGCGTCGTCTACTACCTCTCGGG |
| PTF1a | 1548 | g-CAGGAGCTCCCAAA-GTTTTAGAGCTA- |
| | | CCCGAGAGGTAGTAGACGACGCA- |
| | | TTTTTTTTcagccaactccaaTTTTTTTT- |
| | | TGCGTCGTCTACTACCTCTCGGG |
| PTF1a | 1549 | g-CTGGCACGCGCCTA-GTTTTAGAGCTA- |
| | | CCGACGTCTACGGACGGGAGCTA- |
| | | TTTTTTTTcagccaactccaaTTTTTTTT- |
| | | TAGCTCCCGTCCGTAGACGTCGG |
| PTF1a | 1550 | -GCGCGGGTACGCAG-GTTTTAGAGCTA- |
| | | CCGACGTCTACGGACGGGAGCTA- |
| | | TTTTTTTTcagccaactccaaTTTTTTTT- |
| | | TAGCTCCCGTCCGTAGACGTCGG |
| PTF1a | 1551 | g-TGCCGGCGGCGAGG-GTTTTAGAGCTA- |
| | | CCGACGTCTACGGACGGGAGCTA- |
| | | TTTTTTTTcagccaactccaaTTTTTTTT- |
| | | TAGCTCCCGTCCGTAGACGTCGG |
| PTF1a | 1552 | g-CAGGAGCTCCCAAA-GTTTTAGAGCTA- |
| | | CCGACGTCTACGGACGGGAGCTA- |
| | | TTTTTTTTcagccaactccaaTTTTTTTT- |
| | | TAGCTCCCGTCCGTAGACGTCGG |
| PTF1a | 1553 | g-CTGGCACGCGCCTA-GTTTTAGAGCTA- |
| | | CCAAAGCTCATTCGCGACTGAGC- |
| | | TTTTTTTTcagccaactccaaTTTTTTTT- |
| | | GCTCAGTCGCGAATGAGCTTTGG |
| PTF1a | 1554 | -GCGCGGGTACGCAG-GTTTTAGAGCTA- |
| | | CCAAAGCTCATTCGCGACTGAGC- |
| | | TTTTTTTTcagccaactccaaTTTTTTTT- |
| | | GCTCAGTCGCGAATGAGCTTTGG |
| PTF1a | 1555 | g-TGCCGGCGGCGAGG-GTTTTAGAGCTA- |
| | | CCAAAGCTCATTCGCGACTGAGC- |
| | | TTTTTTTTcagccaactccaaTTTTTTTT- |
| | | GCTCAGTCGCGAATGAGCTTTGG |
| PTF1a | 1556 | g-CAGGAGCTCCCAAA-GTTTTAGAGCTA- |
| | | CCAAAGCTCATTCGCGACTGAGC- |
| | | TTTTTTTTcagccaactccaaTTTTTTTT- |
| | | GCTCAGTCGCGAATGAGCTTTGG |
| PTF1a | 1557 | g-CTGGCACGCGCCTA-GTTTTAGAGCTA- |
| | | CCATGGCACGATCGACACGGAGG- |
| | | TTTTTTTTcagccaactccaaTTTTTTTT- |
| | | CCTCCGTGTCGATCGTGCCATGG |
| PTF1a | 1558 | -GCGCGGGTACGCAG-GTTTTAGAGCTA- |
| | | CCATGGCACGATCGACACGGAGG- |
| | | TTTTTTTTcagccaactccaaTTTTTTTT- |
| | | CCTCCGTGTCGATCGTGCCATGG |
| PTF1a | 1559 | g-TGCCGGCGGCGAGG-GTTTTAGAGCTA- |
| | | CCATGGCACGATCGACACGGAGG- |
| | | TTTTTTTTcagccaactccaaTTTTTTTT- |
| | | CCTCCGTGTCGATCGTGCCATGG |
| PTF1a | 1560 | g-CAGGAGCTCCCAAA-GTTTTAGAGCTA- |
| | | CCATGGCACGATCGACACGGAGG- |
| | | TTTTTTTTcagccaactccaaTTTTTTTT- |
| | | CCTCCGTGTCGATCGTGCCATGG |
| PTF1a | 1561 | g-CTGGCACGCGCCTA-GTTTTAGAGCTA- |
| | | CCCGAACTCTCTATCGAACGAGT- |
| | | TTTTTTTTcagccaactccaaTTTTTTTT- |
| | | ACTCGTTCGATAGAGAGTTCGGG |
| PTF1a | 1562 | -GCGCGGGTACGCAG-GTTTTAGAGCTA- |
| | | CCCGAACTCTCTATCGAACGAGT- |
| | | TTTTTTTTcagccaactccaaTTTTTTTT- |
| | | ACTCGTTCGATAGAGAGTTCGGG |
| PTF1a | 1563 | g-TGCCGGCGGCGAGG-GTTTTAGAGCTA- |
| | | CCCGAACTCTCTATCGAACGAGT- |
| | | TTTTTTTTcagccaactccaaTTTTTTTT- |
| | | ACTCGTTCGATAGAGAGTTCGGG |
| PTF1a | 1564 | g-CAGGAGCTCCCAAA-GTTTTAGAGCTA- |
| | | CCCGAACTCTCTATCGAACGAGT- |
| | | TTTTTTTTcagccaactccaaTTTTTTTT- |
| | | ACTCGTTCGATAGAGAGTTCGGG |
| SHH | 1565 | g-CCCACCTTTATCTT-GTTTTAGAGCTA- |
| | | CCGTCGTTGTACCGTCTACTTGAC- |
| | | TTTTTTTTcagccaactccaaTTTTTTTT- |
| | | GTCAAGTAGACGGTACAACGACGG |
| SHH | 1566 | -GGGGCGCATCTGAT-GTTTTAGAGCTA- |
| | | CCGTCGTTGTACCGTCTACTTGAC- |
| | | TTTTTTTTcagccaactccaaTTTTTTTT- |
| | | GTCAAGTAGACGGTACAACGACGG |
| SHH | 1567 | g-CAGGGGGAAACGCA-GTTTTAGAGCTA- |
| | | CCGTCGTTGTACCGTCTACTTGAC- |
| | | TTTTTTTTcagccaactccaaTTTTTTTT- |
| | | GTCAAGTAGACGGTACAACGACGG |
| SHH | 1568 | -GCCTCTGTGGACCG-GTTTTAGAGCTA- |
| | | CCGTCGTTGTACCGTCTACTTGAC- |
| | | TTTTTTTTcagccaactccaaTTTTTTTT- |
| | | GTCAAGTAGACGGTACAACGACGG |
| SHH | 1569 | g-CCCACCTTTATCTT-GTTTTAGAGCTA- |
| | | CCTACACTCGACATCGGTAGCTA- |
| | | TTTTTTTTcagccaactccaaTTTTTTTT- |
| | | TAGCTACCGATGTCGAGTGTAGG |
| SHH | 1570 | -GGGGCGCATCTGAT-GTTTTAGAGCTA- |
| | | CCTACACTCGACATCGGTAGCTA- |
| | | TTTTTTTTcagccaactccaaTTTTTTTT- |
| | | TAGCTACCGATGTCGAGTGTAGG |
| SHH | 1571 | g-CAGGGGGAAACGCA-GTTTTAGAGCTA- |
| | | CCTACACTCGACATCGGTAGCTA- |
| | | TTTTTTTTcagccaactccaaTTTTTTTT- |
| | | TAGCTACCGATGTCGAGTGTAGG |
| SHH | 1572 | -GCCTCTGTGGACCG-GTTTTAGAGCTA- |
| | | CCTACACTCGACATCGGTAGCTA- |
| | | TTTTTTTTcagccaactccaaTTTTTTTT- |
| | | TAGCTACCGATGTCGAGTGTAGG |
| SHH | 1573 | g-CCCACCTTTATCTT-GTTTTAGAGCTA- |
| | | CCCTGGCGGAACGTTCGAGTAAT- |
| | | TTTTTTTTcagccaactccaaTTTTTTTT- |
| | | ATTACTCGAACGTTCCGCCAGGG |
| SHH | 1574 | -GGGGCGCATCTGAT-GTTTTAGAGCTA- |
| | | CCCTGGCGGAACGTTCGAGTAAT- |
| | | TTTTTTTTcagccaactccaaTTTTTTTT- |
| | | ATTACTCGAACGTTCCGCCAGGG |
| SHH | 1575 | g-CAGGGGGAAACGCA-GTTTTAGAGCTA- |
| | | CCCTGGCGGAACGTTCGAGTAAT- |
| | | TTTTTTTTcagccaactccaaTTTTTTTT- |
| | | ATTACTCGAACGTTCCGCCAGGG |
| SHH | 1576 | -GCCTCTGTGGACCG-GTTTTAGAGCTA- |
| | | CCCTGGCGGAACGTTCGAGTAAT- |
| | | TTTTTTTTcagccaactccaaTTTTTTTT- |
| | | ATTACTCGAACGTTCCGCCAGGG |
| SHH | 1577 | g-CCCACCTTTATCTT-GTTTTAGAGCTA- |
| | | CCTACACGATAGTGGTCGTGCGC- |
| | | TTTTTTTTcagccaactccaaTTTTTTTT- |
| | | GCGCACGACCACTATCGTGTAGG |
| SHH | 1578 | -GGGGCGCATCTGAT-GTTTTAGAGCTA- |
| | | CCTACACGATAGTGGTCGTGCGC- |
| | | TTTTTTTTcagccaactccaaTTTTTTTT- |
| | | GCGCACGACCACTATCGTGTAGG |
| SHH | 1579 | g-CAGGGGGAAACGCA-GTTTTAGAGCTA- |
| | | CCTACACGATAGTGGTCGTGCGC- |
| | | TTTTTTTTcagccaactccaaTTTTTTTT- |
| | | GCGCACGACCACTATCGTGTAGG |
| SHH | 1580 | -GCCTCTGTGGACCG-GTTTTAGAGCTA- |
| | | CCTACACGATAGTGGTCGTGCGC- |
| | | TTTTTTTTcagccaactccaaTTTTTTTT- |
| | | GCGCACGACCACTATCGTGTAGG |
| SHH | 1581 | g-CCCACCTTTATCTT-GTTTTAGAGCTA- |
| | | CCTTCCCGACTTCCGTAGGAGCGC- |
| | | TTTTTTTTcagccaactccaaTTTTTTTT- |
| | | GCGCTCCTACGGAAGTCGGGAAGG |
| SHH | 1582 | -GGGGCGCATCTGAT-GTTTTAGAGCTA- |
| | | CCTTCCCGACTTCCGTAGGAGCGC- |
| | | TTTTTTTTcagccaactccaaTTTTTTTT- |
| | | GCGCTCCTACGGAAGTCGGGAAGG |
| SHH | 1583 | g-CAGGGGGAAACGCA-GTTTTAGAGCTA- |
| | | CCTTCCCGACTTCCGTAGGAGCGC- |
| | | TTTTTTTTcagccaactccaaTTTTTTTT- |
| | | GCGCTCCTACGGAAGTCGGGAAGG |
| SHH | 1584 | -GCCTCTGTGGACCG-GTTTTAGAGCTA- |
| | | CCTTCCCGACTTCCGTAGGAGCGC- |
| | | TTTTTTTTcagccaactccaaTTTTTTTT- |
| | | GCGCTCCTACGGAAGTCGGGAAGG |
| SHH | 1585 | g-CCCACCTTTATCTT-GTTTTAGAGCTA- |
| | | CCTGAAGGTAAAGATCGGGTCCTC- |
| | | TTTTTTTTcagccaactccaaTTTTTTTT- |
| | | GAGGACCCGATCTTTACCTTCAGG |
| SHH | 1586 | -GGGGCGCATCTGAT-GTTTTAGAGCTA- |
| | | CCTGAAGGTAAAGATCGGGTCCTC- |
| | | TTTTTTTTcagccaactccaaTTTTTTTT- |
| | | GAGGACCCGATCTTTACCTTCAGG |
| SHH | 1587 | g-CAGGGGGAAACGCA-GTTTTAGAGCTA- |
| | | CCTGAAGGTAAAGATCGGGTCCTC- |
| | | TTTTTTTTcagccaactccaaTTTTTTTT- |
| | | GAGGACCCGATCTTTACCTTCAGG |
| SHH | 1588 | -GCCTCTGTGGACCG-GTTTTAGAGCTA- |
| | | CCTGAAGGTAAAGATCGGGTCCTC- |
| | | TTTTTTTTcagccaactccaaTTTTTTTT- |
| | | GAGGACCCGATCTTTACCTTCAGG |
| SHH | 1589 | g-CCCACCTTTATCTT-GTTTTAGAGCTA- |
| | | CCTGGTTATAGCGGACGCACTGT- |
| | | TTTTTTTTcagccaactccaaTTTTTTTT- |
| | | ACAGTGCGTCCGCTATAACCAGG |
| SHH | 1590 | -GGGGCGCATCTGAT-GTTTTAGAGCTA- |
| | | CCTGGTTATAGCGGACGCACTGT- |
| | | TTTTTTTTcagccaactccaaTTTTTTTT- |
| | | ACAGTGCGTCCGCTATAACCAGG |
| SHH | 1591 | g-CAGGGGGAAACGCA-GTTTTAGAGCTA- |
| | | CCTGGTTATAGCGGACGCACTGT- |
| | | TTTTTTTTcagccaactccaaTTTTTTTT- |
| | | ACAGTGCGTCCGCTATAACCAGG |
| SHH | 1592 | -GCCTCTGTGGACCG-GTTTTAGAGCTA- |
| | | CCTGGTTATAGCGGACGCACTGT- |
| | | TTTTTTTTcagccaactccaaTTTTTTTT- |
| | | ACAGTGCGTCCGCTATAACCAGG |
| SHH | 1593 | g-CCCACCTTTATCTT-GTTTTAGAGCTA- |
| | | CCGCATCGTATTATCTGCGAAGC- |
| | | TTTTTTTTcagccaactccaaTTTTTTTT- |
| | | GCTTCGCAGATAATACGATGCGG |
| SHH | 1594 | -GGGGCGCATCTGAT-GTTTTAGAGCTA- |
| | | CCGCATCGTATTATCTGCGAAGC- |
| | | TTTTTTTTcagccaactccaaTTTTTTTT- |
| | | GCTTCGCAGATAATACGATGCGG |
| SHH | 1595 | g-CAGGGGGAAACGCA-GTTTTAGAGCTA- |
| | | CCGCATCGTATTATCTGCGAAGC- |
| | | TTTTTTTTcagccaactccaaTTTTTTTT- |
| | | GCTTCGCAGATAATACGATGCGG |
| SHH | 1596 | -GCCTCTGTGGACCG-GTTTTAGAGCTA- |
| | | CCGCATCGTATTATCTGCGAAGC- |
| | | TTTTTTTTcagccaactccaaTTTTTTTT- |
| | | GCTTCGCAGATAATACGATGCGG |
| SHH | 1597 | g-CCCACCTTTATCTT-GTTTTAGAGCTA- |
| | | CCGCTAGGACGTTCAACGGAGTC- |
| | | TTTTTTTTcagccaactccaaTTTTTTTT- |
| | | GACTCCGTTGAACGTCCTAGCGG |
| SHH | 1598 | -GGGGCGCATCTGAT-GTTTTAGAGCTA- |
| | | CCGCTAGGACGTTCAACGGAGTC- |
| | | TTTTTTTTcagccaactccaaTTTTTTTT- |
| | | GACTCCGTTGAACGTCCTAGCGG |
| SHH | 1599 | g-CAGGGGGAAACGCA-GTTTTAGAGCTA- |
| | | CCGCTAGGACGTTCAACGGAGTC- |
| | | TTTTTTTTcagccaactccaaTTTTTTTT- |
| | | GACTCCGTTGAACGTCCTAGCGG |
| SHH | 1600 | -GCCTCTGTGGACCG-GTTTTAGAGCTA- |
| | | CCGCTAGGACGTTCAACGGAGTC- |
| | | TTTTTTTTcagccaactccaaTTTTTTTT- |
| | | GACTCCGTTGAACGTCCTAGCGG |
| SHH | 1601 | g-CCCACCTTTATCTT-GTTTTAGAGCTA- |
| | | CCATAGCGGTACTATCGGCATCT- |
| | | TTTTTTTTcagccaactccaaTTTTTTTT- |
| | | AGATGCCGATAGTACCGCTATGG |
| SHH | 1602 | -GGGGCGCATCTGAT-GTTTTAGAGCTA- |
| | | CCATAGCGGTACTATCGGCATCT- |
| | | TTTTTTTTcagccaactccaaTTTTTTTT- |
| | | AGATGCCGATAGTACCGCTATGG |
| SHH | 1603 | g-CAGGGGGAAACGCA-GTTTTAGAGCTA- |
| | | CCATAGCGGTACTATCGGCATCT- |
| | | TTTTTTTTcagccaactccaaTTTTTTTT- |
| | | AGATGCCGATAGTACCGCTATGG |
| SHH | 1604 | -GCCTCTGTGGACCG-GTTTTAGAGCTA- |
| | | CCATAGCGGTACTATCGGCATCT- |
| | | TTTTTTTTcagccaactccaaTTTTTTTT- |
| | | AGATGCCGATAGTACCGCTATGG |
| SHH | 1605 | g-CCCACCTTTATCTT-GTTTTAGAGCTA- |
| | | CCTCGTACTAGTCTCGCATGACC- |
| | | TTTTTTTTcagccaactccaaTTTTTTTT- |
| | | GGTCATGCGAGACTAGTACGAGG |
| SHH | 1606 | -GGGGCGCATCTGAT-GTTTTAGAGCTA- |
| | | CCTCGTACTAGTCTCGCATGACC- |
| | | TTTTTTTTcagccaactccaaTTTTTTTT- |
| | | GGTCATGCGAGACTAGTACGAGG |
| SHH | 1607 | g-CAGGGGGAAACGCA-GTTTTAGAGCTA- |
| | | CCTCGTACTAGTCTCGCATGACC- |
| | | TTTTTTTTcagccaactccaaTTTTTTTT- |
| | | GGTCATGCGAGACTAGTACGAGG |
| SHH | 1608 | -GCCTCTGTGGACCG-GTTTTAGAGCTA- |
| | | CCTCGTACTAGTCTCGCATGACC- |
| | | TTTTTTTTcagccaactccaaTTTTTTTT- |
| | | GGTCATGCGAGACTAGTACGAGG |
| SHH | 1609 | g-CCCACCTTTATCTT-GTTTTAGAGCTA- |
| | | CCGATAGTGCTAAACGACGCTTT- |
| | | TTTTTTTTcagccaactccaaTTTTTTTT- |
| | | AAAGCGTCGTTTAGCACTATCGG |
| SHH | 1610 | -GGGGCGCATCTGAT-GTTTTAGAGCTA- |
| | | CCGATAGTGCTAAACGACGCTTT- |
| | | TTTTTTTTcagccaactccaaTTTTTTTT- |
| | | AAAGCGTCGTTTAGCACTATCGG |
| SHH | 1611 | g-CAGGGGGAAACGCA-GTTTTAGAGCTA- |
| | | CCGATAGTGCTAAACGACGCTTT- |
| | | TTTTTTTTcagccaactccaaTTTTTTTT- |
| | | AAAGCGTCGTTTAGCACTATCGG |
| SHH | 1612 | -GCCTCTGTGGACCG-GTTTTAGAGCTA- |
| | | CCGATAGTGCTAAACGACGCTTT- |
| | | TTTTTTTTcagccaactccaaTTTTTTTT- |
| | | AAAGCGTCGTTTAGCACTATCGG |
| SHH | 1613 | g-CCCACCTTTATCTT-GTTTTAGAGCTA- |
| | | CCCGTTATCGACGTTCAAGGAAC- |
| | | TTTTTTTTcagccaactccaaTTTTTTTT- |
| | | GTTCCTTGAACGTCGATAACGGG |
| SHH | 1614 | -GGGGCGCATCTGAT-GTTTTAGAGCTA- |
| | | CCCGTTATCGACGTTCAAGGAAC- |
| | | TTTTTTTTcagccaactccaaTTTTTTTT- |
| | | GTTCCTTGAACGTCGATAACGGG |
| SHH | 1615 | g-CAGGGGGAAACGCA-GTTTTAGAGCTA- |
| | | CCCGTTATCGACGTTCAAGGAAC- |
| | | TTTTTTTTcagccaactccaaTTTTTTTT- |
| | | GTTCCTTGAACGTCGATAACGGG |
| SHH | 1616 | -GCCTCTGTGGACCG-GTTTTAGAGCTA- |
| | | CCCGTTATCGACGTTCAAGGAAC- |
| | | TTTTTTTTcagccaactccaaTTTTTTTT- |
| | | GTTCCTTGAACGTCGATAACGGG |
| SHH | 1617 | g-CCCACCTTTATCTT-GTTTTAGAGCTA- |
| | | CCGATCAATGCGGTCTGCGTAAC- |
| | | TTTTTTTTcagccaactccaaTTTTTTTT- |
| | | GTTACGCAGACCGCATTGATCGG |
| SHH | 1618 | -GGGGCGCATCTGAT-GTTTTAGAGCTA- |
| | | CCGATCAATGCGGTCTGCGTAAC- |
| | | TTTTTTTTcagccaactccaaTTTTTTTT- |
| | | GTTACGCAGACCGCATTGATCGG |
| SHH | 1619 | g-CAGGGGGAAACGCA-GTTTTAGAGCTA- |
| | | CCGATCAATGCGGTCTGCGTAAC- |
| | | TTTTTTTTcagccaactccaaTTTTTTTT- |
| | | GTTACGCAGACCGCATTGATCGG |
| SHH | 1620 | -GCCTCTGTGGACCG-GTTTTAGAGCTA- |
| | | CCGATCAATGCGGTCTGCGTAAC- |
| | | TTTTTTTTcagccaactccaaTTTTTTTT- |
| | | GTTACGCAGACCGCATTGATCGG |
| SHH | 1621 | g-CCCACCTTTATCTT-GTTTTAGAGCTA- |
| | | CCCTTACTCGCGATACTCTCGAC- |
| | | TTTTTTTTcagccaactccaaTTTTTTTT- |
| | | GTCGAGAGTATCGCGAGTAAGGG |
| SHH | 1622 | -GGGGCGCATCTGAT-GTTTTAGAGCTA- |
| | | CCCTTACTCGCGATACTCTCGAC- |
| | | TTTTTTTTcagccaactccaaTTTTTTTT- |
| | | GTCGAGAGTATCGCGAGTAAGGG |
| SHH | 1623 | g-CAGGGGGAAACGCA-GTTTTAGAGCTA- |
| | | CCCTTACTCGCGATACTCTCGAC- |
| | | TTTTTTTTcagccaactccaaTTTTTTTT- |
| | | GTCGAGAGTATCGCGAGTAAGGG |
| SHH | 1624 | -GCCTCTGTGGACCG-GTTTTAGAGCTA- |
| | | CCCTTACTCGCGATACTCTCGAC- |
| | | TTTTTTTTcagccaactccaaTTTTTTTT- |
| | | GTCGAGAGTATCGCGAGTAAGGG |
| SHH | 1625 | g-CCCACCTTTATCTT-GTTTTAGAGCTA- |
| | | CCGCGGACGGTAAGCACGGAATA- |
| | | TTTTTTTTcagccaactccaaTTTTTTTT- |
| | | TATTCCGTGCTTACCGTCCGCGG |
| SHH | 1626 | -GGGGCGCATCTGAT-GTTTTAGAGCTA- |
| | | CCGCGGACGGTAAGCACGGAATA- |
| | | TTTTTTTTcagccaactccaaTTTTTTTT- |
| | | TATTCCGTGCTTACCGTCCGCGG |
| SHH | 1627 | g-CAGGGGGAAACGCA-GTTTTAGAGCTA- |
| | | CCGCGGACGGTAAGCACGGAATA- |
| | | TTTTTTTTcagccaactccaaTTTTTTTT- |
| | | TATTCCGTGCTTACCGTCCGCGG |
| SHH | 1628 | -GCCTCTGTGGACCG-GTTTTAGAGCTA- |
| | | CCGCGGACGGTAAGCACGGAATA- |
| | | TTTTTTTTcagccaactccaaTTTTTTTT- |
| | | TATTCCGTGCTTACCGTCCGCGG |
| SHH | 1629 | g-CCCACCTTTATCTT-GTTTTAGAGCTA- |
| | | CCTATAGTCACGAATCGTAGGGT- |
| | | TTTTTTTTcagccaactccaaTTTTTTTT- |
| | | ACCCTACGATTCGTGACTATAGG |
| SHH | 1630 | -GGGGCGCATCTGAT-GTTTTAGAGCTA- |
| | | CCTATAGTCACGAATCGTAGGGT- |
| | | TTTTTTTTcagccaactccaaTTTTTTTT- |
| | | ACCCTACGATTCGTGACTATAGG |
| SHH | 1631 | g-CAGGGGGAAACGCA-GTTTTAGAGCTA- |
| | | CCTATAGTCACGAATCGTAGGGT- |
| | | TTTTTTTTcagccaactccaaTTTTTTTT- |
| | | ACCCTACGATTCGTGACTATAGG |
| SHH | 1632 | -GCCTCTGTGGACCG-GTTTTAGAGCTA- |
| | | CCTATAGTCACGAATCGTAGGGT- |
| | | TTTTTTTTcagccaactccaaTTTTTTTT- |
| | | ACCCTACGATTCGTGACTATAGG |
| SHH | 1633 | g-CCCACCTTTATCTT-GTTTTAGAGCTA- |
| | | CCCGTCGTCACGTATGCGTAGCA- |
| | | TTTTTTTTcagccaactccaaTTTTTTTT- |
| | | TGCTACGCATACGTGACGACGGG |
| SHH | 1634 | -GGGGCGCATCTGAT-GTTTTAGAGCTA- |
| | | CCCGTCGTCACGTATGCGTAGCA- |
| | | TTTTTTTTcagccaactccaaTTTTTTTT- |
| | | TGCTACGCATACGTGACGACGGG |
| SHH | 1635 | g-CAGGGGGAAACGCA-GTTTTAGAGCTA- |
| | | CCCGTCGTCACGTATGCGTAGCA- |
| | | TTTTTTTTcagccaactccaaTTTTTTTT- |
| | | TGCTACGCATACGTGACGACGGG |
| SHH | 1636 | -GCCTCTGTGGACCG-GTTTTAGAGCTA- |
| | | CCCGTCGTCACGTATGCGTAGCA- |
| | | TTTTTTTTcagccaactccaaTTTTTTTT- |
| | | TGCTACGCATACGTGACGACGGG |
| SHH | 1637 | g-CCCACCTTTATCTT-GTTTTAGAGCTA- |
| | | CCCGAGAGGTAGTAGACGACGCA- |
| | | TTTTTTTTcagccaactccaaTTTTTTTT- |
| | | TGCGTCGTCTACTACCTCTCGGG |
| SHH | 1638 | -GGGGCGCATCTGAT-GTTTTAGAGCTA- |
| | | CCCGAGAGGTAGTAGACGACGCA- |
| | | TTTTTTTTcagccaactccaaTTTTTTTT- |
| | | TGCGTCGTCTACTACCTCTCGGG |
| SHH | 1639 | g-CAGGGGGAAACGCA-GTTTTAGAGCTA- |
| | | CCCGAGAGGTAGTAGACGACGCA- |
| | | TTTTTTTTcagccaactccaaTTTTTTTT- |
| | | TGCGTCGTCTACTACCTCTCGGG |
| SHH | 1640 | -GCCTCTGTGGACCG-GTTTTAGAGCTA- |
| | | CCCGAGAGGTAGTAGACGACGCA- |
| | | TTTTTTTTcagccaactccaaTTTTTTTT- |
| | | TGCGTCGTCTACTACCTCTCGGG |
| SHH | 1641 | g-CCCACCTTTATCTT-GTTTTAGAGCTA- |
| | | CCGACGTCTACGGACGGGAGCTA- |
| | | TTTTTTTTcagccaactccaaTTTTTTTT- |
| | | TAGCTCCCGTCCGTAGACGTCGG |
| SHH | 1642 | -GGGGCGCATCTGAT-GTTTTAGAGCTA- |
| | | CCGACGTCTACGGACGGGAGCTA- |
| | | TTTTTTTTcagccaactccaaTTTTTTTT- |
| | | TAGCTCCCGTCCGTAGACGTCGG |
| SHH | 1643 | g-CAGGGGGAAACGCA-GTTTTAGAGCTA- |
| | | CCGACGTCTACGGACGGGAGCTA- |
| | | TTTTTTTTcagccaactccaaTTTTTTTT- |
| | | TAGCTCCCGTCCGTAGACGTCGG |
| SHH | 1644 | -GCCTCTGTGGACCG-GTTTTAGAGCTA- |
| | | CCGACGTCTACGGACGGGAGCTA- |
| | | TTTTTTTTcagccaactccaaTTTTTTTT- |
| | | TAGCTCCCGTCCGTAGACGTCGG |
| SHH | 1645 | g-CCCACCTTTATCTT-GTTTTAGAGCTA- |
| | | CCAAAGCTCATTCGCGACTGAGC- |
| | | TTTTTTTTcagccaactccaaTTTTTTTT- |
| | | GCTCAGTCGCGAATGAGCTTTGG |
| SHH | 1646 | -GGGGCGCATCTGAT-GTTTTAGAGCTA- |
| | | CCAAAGCTCATTCGCGACTGAGC- |
| | | TTTTTTTTcagccaactccaaTTTTTTTT- |
| | | GCTCAGTCGCGAATGAGCTTTGG |
| SHH | 1647 | g-CAGGGGGAAACGCA-GTTTTAGAGCTA- |
| | | CCAAAGCTCATTCGCGACTGAGC- |
| | | TTTTTTTTcagccaactccaaTTTTTTTT- |
| | | GCTCAGTCGCGAATGAGCTTTGG |
| SHH | 1648 | -GCCTCTGTGGACCG-GTTTTAGAGCTA- |
| | | CCAAAGCTCATTCGCGACTGAGC- |
| | | TTTTTTTTcagccaactccaaTTTTTTTT- |
| | | GCTCAGTCGCGAATGAGCTTTGG |
| SHH | 1649 | g-CCCACCTTTATCTT-GTTTTAGAGCTA- |
| | | CCATGGCACGATCGACACGGAGG- |
| | | TTTTTTTTcagccaactccaaTTTTTTTT- |
| | | CCTCCGTGTCGATCGTGCCATGG |
| SHH | 1650 | -GGGGCGCATCTGAT-GTTTTAGAGCTA- |
| | | CCATGGCACGATCGACACGGAGG- |
| | | TTTTTTTTcagccaactccaaTTTTTTTT- |
| | | CCTCCGTGTCGATCGTGCCATGG |
| SHH | 1651 | g-CAGGGGGAAACGCA-GTTTTAGAGCTA- |
| | | CCATGGCACGATCGACACGGAGG- |
| | | TTTTTTTTcagccaactccaaTTTTTTTT- |
| | | CCTCCGTGTCGATCGTGCCATGG |
| SHH | 1652 | -GCCTCTGTGGACCG-GTTTTAGAGCTA- |
| | | CCATGGCACGATCGACACGGAGG- |
| | | TTTTTTTTcagccaactccaaTTTTTTTT- |
| | | CCTCCGTGTCGATCGTGCCATGG |
| SHH | 1653 | g-CCCACCTTTATCTT-GTTTTAGAGCTA- |
| | | CCCGAACTCTCTATCGAACGAGT- |
| | | TTTTTTTTcagccaactccaaTTTTTTTT- |
| | | ACTCGTTCGATAGAGAGTTCGGG |
| SHH | 1654 | -GGGGCGCATCTGAT-GTTTTAGAGCTA- |
| | | CCCGAACTCTCTATCGAACGAGT- |
| | | TTTTTTTTcagccaactccaaTTTTTTTT- |
| | | ACTCGTTCGATAGAGAGTTCGGG |
| SHH | 1655 | g-CAGGGGGAAACGCA-GTTTTAGAGCTA- |
| | | CCCGAACTCTCTATCGAACGAGT- |
| | | TTTTTTTTcagccaactccaaTTTTTTTT- |
| | | ACTCGTTCGATAGAGAGTTCGGG |
| SHH | 1656 | -GCCTCTGTGGACCG-GTTTTAGAGCTA- |
| | | CCCGAACTCTCTATCGAACGAGT- |
| | | TTTTTTTTcagccaactccaaTTTTTTTT- |
| | | ACTCGTTCGATAGAGAGTTCGGG |
| sox17 | 1657 | g-TTAGGCCCACGCCC-GTTTTAGAGCTA- |
| | | CCGTCGTTGTACCGTCTACTTGAC- |
| | | TTTTTTTTcagccaactccaaTTTTTTTT- |
| | | GTCAAGTAGACGGTACAACGACGG |
| sox17 | 1658 | -GTAGCCTTGGGCGC-GTTTTAGAGCTA- |
| | | CCGTCGTTGTACCGTCTACTTGAC- |
| | | TTTTTTTTcagccaactccaaTTTTTTTT- |
| | | GTCAAGTAGACGGTACAACGACGG |
| sox17 | 1659 | -GCGTCCTCTCCCAC-GTTTTAGAGCTA- |
| | | CCGTCGTTGTACCGTCTACTTGAC- |
| | | TTTTTTTTcagccaactccaaTTTTTTTT- |
| | | GTCAAGTAGACGGTACAACGACGG |
| sox17 | 1660 | g-CCCGCAGTGTCACT-GTTTTAGAGCTA- |
| | | CCGTCGTTGTACCGTCTACTTGAC- |
| | | TTTTTTTTcagccaactccaaTTTTTTTT- |
| | | GTCAAGTAGACGGTACAACGACGG |
| sox17 | 1661 | g-TTAGGCCCACGCCC-GTTTTAGAGCTA- |
| | | CCTACACTCGACATCGGTAGCTA- |
| | | TTTTTTTTcagccaactccaaTTTTTTTT- |
| | | TAGCTACCGATGTCGAGTGTAGG |
| sox17 | 1662 | -GTAGCCTTGGGCGC-GTTTTAGAGCTA- |
| | | CCTACACTCGACATCGGTAGCTA- |
| | | TTTTTTTTcagccaactccaaTTTTTTTT- |
| | | TAGCTACCGATGTCGAGTGTAGG |
| sox17 | 1663 | -GCGTCCTCTCCCAC-GTTTTAGAGCTA- |
| | | CCTACACTCGACATCGGTAGCTA- |
| | | TTTTTTTTcagccaactccaaTTTTTTTT- |
| | | TAGCTACCGATGTCGAGTGTAGG |
| sox17 | 1664 | g-CCCGCAGTGTCACT-GTTTTAGAGCTA- |
| | | CCTACACTCGACATCGGTAGCTA- |
| | | TTTTTTTTcagccaactccaaTTTTTTTT- |
| | | TAGCTACCGATGTCGAGTGTAGG |
| sox17 | 1665 | g-TTAGGCCCACGCCC-GTTTTAGAGCTA- |
| | | CCCTGGCGGAACGTTCGAGTAAT- |
| | | TTTTTTTTcagccaactccaaTTTTTTTT- |
| | | ATTACTCGAACGTTCCGCCAGGG |
| sox17 | 1666 | -GTAGCCTTGGGCGC-GTTTTAGAGCTA- |
| | | CCCTGGCGGAACGTTCGAGTAAT- |
| | | TTTTTTTTcagccaactccaaTTTTTTTT- |
| | | ATTACTCGAACGTTCCGCCAGGG |
| sox17 | 1667 | -GCGTCCTCTCCCAC-GTTTTAGAGCTA- |
| | | CCCTGGCGGAACGTTCGAGTAAT- |
| | | TTTTTTTTcagccaactccaaTTTTTTTT- |
| | | ATTACTCGAACGTTCCGCCAGGG |
| sox17 | 1668 | g-CCCGCAGTGTCACT-GTTTTAGAGCTA- |
| | | CCCTGGCGGAACGTTCGAGTAAT- |
| | | TTTTTTTTcagccaactccaaTTTTTTTT- |
| | | ATTACTCGAACGTTCCGCCAGGG |
| sox17 | 1669 | g-TTAGGCCCACGCCC-GTTTTAGAGCTA- |
| | | CCTACACGATAGTGGTCGTGCGC- |
| | | TTTTTTTTcagccaactccaaTTTTTTTT- |
| | | GCGCACGACCACTATCGTGTAGG |
| sox17 | 1670 | -GTAGCCTTGGGCGC-GTTTTAGAGCTA- |
| | | CCTACACGATAGTGGTCGTGCGC- |
| | | TTTTTTTTcagccaactccaaTTTTTTTT- |
| | | GCGCACGACCACTATCGTGTAGG |
| sox17 | 1671 | -GCGTCCTCTCCCAC-GTTTTAGAGCTA- |
| | | CCTACACGATAGTGGTCGTGCGC- |
| | | TTTTTTTTcagccaactccaaTTTTTTTT- |
| | | GCGCACGACCACTATCGTGTAGG |
| sox17 | 1672 | g-CCCGCAGTGTCACT-GTTTTAGAGCTA- |
| | | CCTACACGATAGTGGTCGTGCGC- |
| | | TTTTTTTTcagccaactccaaTTTTTTTT- |
| | | GCGCACGACCACTATCGTGTAGG |
| sox17 | 1673 | g-TTAGGCCCACGCCC-GTTTTAGAGCTA- |
| | | CCTTCCCGACTTCCGTAGGAGCGC- |
| | | TTTTTTTTcagccaactccaaTTTTTTTT- |
| | | GCGCTCCTACGGAAGTCGGGAAGG |
| sox17 | 1674 | -GTAGCCTTGGGCGC-GTTTTAGAGCTA- |
| | | CCTTCCCGACTTCCGTAGGAGCGC- |
| | | TTTTTTTTcagccaactccaaTTTTTTTT- |
| | | GCGCTCCTACGGAAGTCGGGAAGG |
| sox17 | 1675 | -GCGTCCTCTCCCAC-GTTTTAGAGCTA- |
| | | CCTTCCCGACTTCCGTAGGAGCGC- |
| | | TTTTTTTTcagccaactccaaTTTTTTTT- |
| | | GCGCTCCTACGGAAGTCGGGAAGG |
| sox17 | 1676 | g-CCCGCAGTGTCACT-GTTTTAGAGCTA- |
| | | CCTTCCCGACTTCCGTAGGAGCGC- |
| | | TTTTTTTTcagccaactccaaTTTTTTTT- |
| | | GCGCTCCTACGGAAGTCGGGAAGG |
| sox17 | 1677 | g-TTAGGCCCACGCCC-GTTTTAGAGCTA- |
| | | CCTGAAGGTAAAGATCGGGTCCTC- |
| | | TTTTTTTTcagccaactccaaTTTTTTTT- |
| | | GAGGACCCGATCTTTACCTTCAGG |
| sox17 | 1678 | -GTAGCCTTGGGCGC-GTTTTAGAGCTA- |
| | | CCTGAAGGTAAAGATCGGGTCCTC- |
| | | TTTTTTTTcagccaactccaaTTTTTTTT- |
| | | GAGGACCCGATCTTTACCTTCAGG |
| sox17 | 1679 | -GCGTCCTCTCCCAC-GTTTTAGAGCTA- |
| | | CCTGAAGGTAAAGATCGGGTCCTC- |
| | | TTTTTTTTcagccaactccaaTTTTTTTT- |
| | | GAGGACCCGATCTTTACCTTCAGG |
| sox17 | 1680 | g-CCCGCAGTGTCACT-GTTTTAGAGCTA- |
| | | CCTGAAGGTAAAGATCGGGTCCTC- |
| | | TTTTTTTTcagccaactccaaTTTTTTTT- |
| | | GAGGACCCGATCTTTACCTTCAGG |
| sox17 | 1681 | g-TTAGGCCCACGCCC-GTTTTAGAGCTA- |
| | | CCTGGTTATAGCGGACGCACTGT- |
| | | TTTTTTTTcagccaactccaaTTTTTTTT- |
| | | ACAGTGCGTCCGCTATAACCAGG |
| sox17 | 1682 | -GTAGCCTTGGGCGC-GTTTTAGAGCTA- |
| | | CCTGGTTATAGCGGACGCACTGT- |
| | | TTTTTTTTcagccaactccaaTTTTTTTT- |
| | | ACAGTGCGTCCGCTATAACCAGG |
| sox17 | 1683 | -GCGTCCTCTCCCAC-GTTTTAGAGCTA- |
| | | CCTGGTTATAGCGGACGCACTGT- |
| | | TTTTTTTTcagccaactccaaTTTTTTTT- |
| | | ACAGTGCGTCCGCTATAACCAGG |
| sox17 | 1684 | g-CCCGCAGTGTCACT-GTTTTAGAGCTA- |
| | | CCTGGTTATAGCGGACGCACTGT- |
| | | TTTTTTTTcagccaactccaaTTTTTTTT- |
| | | ACAGTGCGTCCGCTATAACCAGG |
| sox17 | 1685 | g-TTAGGCCCACGCCC-GTTTTAGAGCTA- |
| | | CCGCATCGTATTATCTGCGAAGC- |
| | | TTTTTTTTcagccaactccaaTTTTTTTT- |
| | | GCTTCGCAGATAATACGATGCGG |
| sox17 | 1686 | -GTAGCCTTGGGCGC-GTTTTAGAGCTA- |
| | | CCGCATCGTATTATCTGCGAAGC- |
| | | TTTTTTTTcagccaactccaaTTTTTTTT- |
| | | GCTTCGCAGATAATACGATGCGG |
| sox17 | 1687 | -GCGTCCTCTCCCAC-GTTTTAGAGCTA- |
| | | CCGCATCGTATTATCTGCGAAGC- |
| | | TTTTTTTTcagccaactccaaTTTTTTTT- |
| | | GCTTCGCAGATAATACGATGCGG |
| sox17 | 1688 | g-CCCGCAGTGTCACT-GTTTTAGAGCTA- |
| | | CCGCATCGTATTATCTGCGAAGC- |
| | | TTTTTTTTcagccaactccaaTTTTTTTT- |
| | | GCTTCGCAGATAATACGATGCGG |
| sox17 | 1689 | g-TTAGGCCCACGCCC-GTTTTAGAGCTA- |
| | | CCGCTAGGACGTTCAACGGAGTC- |
| | | TTTTTTTTcagccaactccaaTTTTTTTT- |
| | | GACTCCGTTGAACGTCCTAGCGG |
| sox17 | 1690 | -GTAGCCTTGGGCGC-GTTTTAGAGCTA- |
| | | CCGCTAGGACGTTCAACGGAGTC- |
| | | TTTTTTTTcagccaactccaaTTTTTTTT- |
| | | GACTCCGTTGAACGTCCTAGCGG |
| sox17 | 1691 | -GCGTCCTCTCCCAC-GTTTTAGAGCTA- |
| | | CCGCTAGGACGTTCAACGGAGTC- |
| | | TTTTTTTTcagccaactccaaTTTTTTTT- |
| | | GACTCCGTTGAACGTCCTAGCGG |
| sox17 | 1692 | g-CCCGCAGTGTCACT-GTTTTAGAGCTA- |
| | | CCGCTAGGACGTTCAACGGAGTC- |
| | | TTTTTTTTcagccaactccaaTTTTTTTT- |
| | | GACTCCGTTGAACGTCCTAGCGG |
| sox17 | 1693 | g-TTAGGCCCACGCCC-GTTTTAGAGCTA- |
| | | CCATAGCGGTACTATCGGCATCT- |
| | | TTTTTTTTcagccaactccaaTTTTTTTT- |
| | | AGATGCCGATAGTACCGCTATGG |
| sox17 | 1694 | -GTAGCCTTGGGCGC-GTTTTAGAGCTA- |
| | | CCATAGCGGTACTATCGGCATCT- |
| | | TTTTTTTTcagccaactccaaTTTTTTTT- |
| | | AGATGCCGATAGTACCGCTATGG |
| sox17 | 1695 | -GCGTCCTCTCCCAC-GTTTTAGAGCTA- |
| | | CCATAGCGGTACTATCGGCATCT- |
| | | TTTTTTTTcagccaactccaaTTTTTTTT- |
| | | AGATGCCGATAGTACCGCTATGG |
| sox17 | 1696 | g-CCCGCAGTGTCACT-GTTTTAGAGCTA- |
| | | CCATAGCGGTACTATCGGCATCT- |
| | | TTTTTTTTcagccaactccaaTTTTTTTT- |
| | | AGATGCCGATAGTACCGCTATGG |
| sox17 | 1697 | g-TTAGGCCCACGCCC-GTTTTAGAGCTA- |
| | | CCTCGTACTAGTCTCGCATGACC- |
| | | TTTTTTTTcagccaactccaaTTTTTTTT- |
| | | GGTCATGCGAGACTAGTACGAGG |
| sox17 | 1698 | -GTAGCCTTGGGCGC-GTTTTAGAGCTA- |
| | | CCTCGTACTAGTCTCGCATGACC- |
| | | TTTTTTTTcagccaactccaaTTTTTTTT- |
| | | GGTCATGCGAGACTAGTACGAGG |
| sox17 | 1699 | -GCGTCCTCTCCCAC-GTTTTAGAGCTA- |
| | | CCTCGTACTAGTCTCGCATGACC- |
| | | TTTTTTTTcagccaactccaaTTTTTTTT- |
| | | GGTCATGCGAGACTAGTACGAGG |
| sox17 | 1700 | g-CCCGCAGTGTCACT-GTTTTAGAGCTA- |
| | | CCTCGTACTAGTCTCGCATGACC- |
| | | TTTTTTTTcagccaactccaaTTTTTTTT- |
| | | GGTCATGCGAGACTAGTACGAGG |
| sox17 | 1701 | g-TTAGGCCCACGCCC-GTTTTAGAGCTA- |
| | | CCGATAGTGCTAAACGACGCTTT- |
| | | TTTTTTTTcagccaactccaaTTTTTTTT- |
| | | AAAGCGTCGTTTAGCACTATCGG |
| sox17 | 1702 | -GTAGCCTTGGGCGC-GTTTTAGAGCTA- |
| | | CCGATAGTGCTAAACGACGCTTT- |
| | | TTTTTTTTcagccaactccaaTTTTTTTT- |
| | | AAAGCGTCGTTTAGCACTATCGG |
| sox17 | 1703 | -GCGTCCTCTCCCAC-GTTTTAGAGCTA- |
| | | CCGATAGTGCTAAACGACGCTTT- |
| | | TTTTTTTTcagccaactccaaTTTTTTTT- |
| | | AAAGCGTCGTTTAGCACTATCGG |
| sox17 | 1704 | g-CCCGCAGTGTCACT-GTTTTAGAGCTA- |
| | | CCGATAGTGCTAAACGACGCTTT- |
| | | TTTTTTTTcagccaactccaaTTTTTTTT- |
| | | AAAGCGTCGTTTAGCACTATCGG |
| sox17 | 1705 | g-TTAGGCCCACGCCC-GTTTTAGAGCTA- |
| | | CCCGTTATCGACGTTCAAGGAAC- |
| | | TTTTTTTTcagccaactccaaTTTTTTTT- |
| | | GTTCCTTGAACGTCGATAACGGG |
| sox17 | 1706 | -GTAGCCTTGGGCGC-GTTTTAGAGCTA- |
| | | CCCGTTATCGACGTTCAAGGAAC- |
| | | TTTTTTTTcagccaactccaaTTTTTTTT- |
| | | GTTCCTTGAACGTCGATAACGGG |
| sox17 | 1707 | -GCGTCCTCTCCCAC-GTTTTAGAGCTA- |
| | | CCCGTTATCGACGTTCAAGGAAC- |
| | | TTTTTTTTcagccaactccaaTTTTTTTT- |
| | | GTTCCTTGAACGTCGATAACGGG |
| sox17 | 1708 | g-CCCGCAGTGTCACT-GTTTTAGAGCTA- |
| | | CCCGTTATCGACGTTCAAGGAAC- |
| | | TTTTTTTTcagccaactccaaTTTTTTTT- |
| | | GTTCCTTGAACGTCGATAACGGG |
| sox17 | 1709 | g-TTAGGCCCACGCCC-GTTTTAGAGCTA- |
| | | CCGATCAATGCGGTCTGCGTAAC- |
| | | TTTTTTTTcagccaactccaaTTTTTTTT- |
| | | GTTACGCAGACCGCATTGATCGG |
| sox17 | 1710 | -GTAGCCTTGGGCGC-GTTTTAGAGCTA- |
| | | CCGATCAATGCGGTCTGCGTAAC- |
| | | TTTTTTTTcagccaactccaaTTTTTTTT- |
| | | GTTACGCAGACCGCATTGATCGG |
| sox17 | 1711 | -GCGTCCTCTCCCAC-GTTTTAGAGCTA- |
| | | CCGATCAATGCGGTCTGCGTAAC- |
| | | TTTTTTTTcagccaactccaaTTTTTTTT- |
| | | GTTACGCAGACCGCATTGATCGG |
| sox17 | 1712 | g-CCCGCAGTGTCACT-GTTTTAGAGCTA- |
| | | CCGATCAATGCGGTCTGCGTAAC- |
| | | TTTTTTTTcagccaactccaaTTTTTTTT- |
| | | GTTACGCAGACCGCATTGATCGG |
| sox17 | 1713 | g-TTAGGCCCACGCCC-GTTTTAGAGCTA- |
| | | CCCTTACTCGCGATACTCTCGAC- |
| | | TTTTTTTTcagccaactccaaTTTTTTTT- |
| | | GTCGAGAGTATCGCGAGTAAGGG |
| sox17 | 1714 | -GTAGCCTTGGGCGC-GTTTTAGAGCTA- |
| | | CCCTTACTCGCGATACTCTCGAC- |
| | | TTTTTTTTcagccaactccaaTTTTTTTT- |
| | | GTCGAGAGTATCGCGAGTAAGGG |
| sox17 | 1715 | -GCGTCCTCTCCCAC-GTTTTAGAGCTA- |
| | | CCCTTACTCGCGATACTCTCGAC- |
| | | TTTTTTTTcagccaactccaaTTTTTTTT- |
| | | GTCGAGAGTATCGCGAGTAAGGG |
| sox17 | 1716 | g-CCCGCAGTGTCACT-GTTTTAGAGCTA- |
| | | CCCTTACTCGCGATACTCTCGAC- |
| | | TTTTTTTTcagccaactccaaTTTTTTTT- |
| | | GTCGAGAGTATCGCGAGTAAGGG |
| sox17 | 1717 | g-TTAGGCCCACGCCC-GTTTTAGAGCTA- |
| | | CCGCGGACGGTAAGCACGGAATA- |
| | | TTTTTTTTcagccaactccaaTTTTTTTT- |
| | | TATTCCGTGCTTACCGTCCGCGG |
| sox17 | 1718 | -GTAGCCTTGGGCGC-GTTTTAGAGCTA- |
| | | CCGCGGACGGTAAGCACGGAATA- |
| | | TTTTTTTTcagccaactccaaTTTTTTTT- |
| | | TATTCCGTGCTTACCGTCCGCGG |
| sox17 | 1719 | -GCGTCCTCTCCCAC-GTTTTAGAGCTA- |
| | | CCGCGGACGGTAAGCACGGAATA- |
| | | TTTTTTTTcagccaactccaaTTTTTTTT- |
| | | TATTCCGTGCTTACCGTCCGCGG |
| sox17 | 1720 | g-CCCGCAGTGTCACT-GTTTTAGAGCTA- |
| | | CCGCGGACGGTAAGCACGGAATA- |
| | | TTTTTTTTcagccaactccaaTTTTTTTT- |
| | | TATTCCGTGCTTACCGTCCGCGG |
| sox17 | 1721 | g-TTAGGCCCACGCCC-GTTTTAGAGCTA- |
| | | CCTATAGTCACGAATCGTAGGGT- |
| | | TTTTTTTTcagccaactccaaTTTTTTTT- |
| | | ACCCTACGATTCGTGACTATAGG |
| sox17 | 1722 | -GTAGCCTTGGGCGC-GTTTTAGAGCTA- |
| | | CCTATAGTCACGAATCGTAGGGT- |
| | | TTTTTTTTcagccaactccaaTTTTTTTT- |
| | | ACCCTACGATTCGTGACTATAGG |
| sox17 | 1723 | -GCGTCCTCTCCCAC-GTTTTAGAGCTA- |
| | | CCTATAGTCACGAATCGTAGGGT- |
| | | TTTTTTTTcagccaactccaaTTTTTTTT- |
| | | ACCCTACGATTCGTGACTATAGG |
| sox17 | 1724 | g-CCCGCAGTGTCACT-GTTTTAGAGCTA- |
| | | CCTATAGTCACGAATCGTAGGGT- |
| | | TTTTTTTTcagccaactccaaTTTTTTTT- |
| | | ACCCTACGATTCGTGACTATAGG |
| sox17 | 1725 | g-TTAGGCCCACGCCC-GTTTTAGAGCTA- |
| | | CCCGTCGTCACGTATGCGTAGCA- |
| | | TTTTTTTTcagccaactccaaTTTTTTTT- |
| | | TGCTACGCATACGTGACGACGGG |
| sox17 | 1726 | -GTAGCCTTGGGCGC-GTTTTAGAGCTA- |
| | | CCCGTCGTCACGTATGCGTAGCA- |
| | | TTTTTTTTcagccaactccaaTTTTTTTT- |
| | | TGCTACGCATACGTGACGACGGG |
| sox17 | 1727 | -GCGTCCTCTCCCAC-GTTTTAGAGCTA- |
| | | CCCGTCGTCACGTATGCGTAGCA- |
| | | TTTTTTTTcagccaactccaaTTTTTTTT- |
| | | TGCTACGCATACGTGACGACGGG |
| sox17 | 1728 | g-CCCGCAGTGTCACT-GTTTTAGAGCTA- |
| | | CCCGTCGTCACGTATGCGTAGCA- |
| | | TTTTTTTTcagccaactccaaTTTTTTTT- |
| | | TGCTACGCATACGTGACGACGGG |
| sox17 | 1729 | g-TTAGGCCCACGCCC-GTTTTAGAGCTA- |
| | | CCCGAGAGGTAGTAGACGACGCA- |
| | | TTTTTTTTcagccaactccaaTTTTTTTT- |
| | | TGCGTCGTCTACTACCTCTCGGG |
| sox17 | 1730 | -GTAGCCTTGGGCGC-GTTTTAGAGCTA- |
| | | CCCGAGAGGTAGTAGACGACGCA- |
| | | TTTTTTTTcagccaactccaaTTTTTTTT- |
| | | TGCGTCGTCTACTACCTCTCGGG |
| sox17 | 1731 | -GCGTCCTCTCCCAC-GTTTTAGAGCTA- |
| | | CCCGAGAGGTAGTAGACGACGCA- |
| | | TTTTTTTTcagccaactccaaTTTTTTTT- |
| | | TGCGTCGTCTACTACCTCTCGGG |
| sox17 | 1732 | g-CCCGCAGTGTCACT-GTTTTAGAGCTA- |
| | | CCCGAGAGGTAGTAGACGACGCA- |
| | | TTTTTTTTcagccaactccaaTTTTTTTT- |
| | | TGCGTCGTCTACTACCTCTCGGG |
| sox17 | 1733 | g-TTAGGCCCACGCCC-GTTTTAGAGCTA- |
| | | CCGACGTCTACGGACGGGAGCTA- |
| | | TTTTTTTTcagccaactccaaTTTTTTTT- |
| | | TAGCTCCCGTCCGTAGACGTCGG |
| sox17 | 1734 | -GTAGCCTTGGGCGC-GTTTTAGAGCTA- |
| | | CCGACGTCTACGGACGGGAGCTA- |
| | | TTTTTTTTcagccaactccaaTTTTTTTT- |
| | | TAGCTCCCGTCCGTAGACGTCGG |
| sox17 | 1735 | -GCGTCCTCTCCCAC-GTTTTAGAGCTA- |
| | | CCGACGTCTACGGACGGGAGCTA- |
| | | TTTTTTTTcagccaactccaaTTTTTTTT- |
| | | TAGCTCCCGTCCGTAGACGTCGG |
| sox17 | 1736 | g-CCCGCAGTGTCACT-GTTTTAGAGCTA- |
| | | CCGACGTCTACGGACGGGAGCTA- |
| | | TTTTTTTTcagccaactccaaTTTTTTTT- |
| | | TAGCTCCCGTCCGTAGACGTCGG |
| sox17 | 1737 | g-TTAGGCCCACGCCC-GTTTTAGAGCTA- |
| | | CCAAAGCTCATTCGCGACTGAGC- |
| | | TTTTTTTTcagccaactccaaTTTTTTTT- |
| | | GCTCAGTCGCGAATGAGCTTTGG |
| sox17 | 1738 | -GTAGCCTTGGGCGC-GTTTTAGAGCTA- |
| | | CCAAAGCTCATTCGCGACTGAGC- |
| | | TTTTTTTTcagccaactccaaTTTTTTTT- |
| | | GCTCAGTCGCGAATGAGCTTTGG |
| sox17 | 1739 | -GCGTCCTCTCCCAC-GTTTTAGAGCTA- |
| | | CCAAAGCTCATTCGCGACTGAGC- |
| | | TTTTTTTTcagccaactccaaTTTTTTTT- |
| | | GCTCAGTCGCGAATGAGCTTTGG |
| sox17 | 1740 | g-CCCGCAGTGTCACT-GTTTTAGAGCTA- |
| | | CCAAAGCTCATTCGCGACTGAGC- |
| | | TTTTTTTTcagccaactccaaTTTTTTTT- |
| | | GCTCAGTCGCGAATGAGCTTTGG |
| sox17 | 1741 | g-TTAGGCCCACGCCC-GTTTTAGAGCTA- |
| | | CCATGGCACGATCGACACGGAGG- |
| | | TTTTTTTTcagccaactccaaTTTTTTTT- |
| | | CCTCCGTGTCGATCGTGCCATGG |
| sox17 | 1742 | -GTAGCCTTGGGCGC-GTTTTAGAGCTA- |
| | | CCATGGCACGATCGACACGGAGG- |
| | | TTTTTTTTcagccaactccaaTTTTTTTT- |
| | | CCTCCGTGTCGATCGTGCCATGG |
| sox17 | 1743 | -GCGTCCTCTCCCAC-GTTTTAGAGCTA- |
| | | CCATGGCACGATCGACACGGAGG- |
| | | TTTTTTTTcagccaactccaaTTTTTTTT- |
| | | CCTCCGTGTCGATCGTGCCATGG |
| sox17 | 1744 | g-CCCGCAGTGTCACT-GTTTTAGAGCTA- |
| | | CCATGGCACGATCGACACGGAGG- |
| | | TTTTTTTTcagccaactccaaTTTTTTTT- |
| | | CCTCCGTGTCGATCGTGCCATGG |
| sox17 | 1745 | g-TTAGGCCCACGCCC-GTTTTAGAGCTA- |
| | | CCCGAACTCTCTATCGAACGAGT- |
| | | TTTTTTTTcagccaactccaaTTTTTTTT- |
| | | ACTCGTTCGATAGAGAGTTCGGG |
| sox17 | 1746 | -GTAGCCTTGGGCGC-GTTTTAGAGCTA- |
| | | CCCGAACTCTCTATCGAACGAGT- |
| | | TTTTTTTTcagccaactccaaTTTTTTTT- |
| | | ACTCGTTCGATAGAGAGTTCGGG |
| sox17 | 1747 | -GCGTCCTCTCCCAC-GTTTTAGAGCTA- |
| | | CCCGAACTCTCTATCGAACGAGT- |
| | | TTTTTTTTcagccaactccaaTTTTTTTT- |
| | | ACTCGTTCGATAGAGAGTTCGGG |
| sox17 | 1748 | g-CCCGCAGTGTCACT-GTTTTAGAGCTA- |
| | | CCCGAACTCTCTATCGAACGAGT- |
| | | TTTTTTTTcagccaactccaaTTTTTTTT- |
| | | ACTCGTTCGATAGAGAGTTCGGG |
| SOX9 | 1749 | g-CAAACTTACACACT-GTTTTAGAGCTA- |
| | | CCGTCGTTGTACCGTCTACTTGAC- |
| | | TTTTTTTTcagccaactccaaTTTTTTTT- |
| | | GTCAAGTAGACGGTACAACGACGG |
| SOX9 | 1750 | g-AAAGGGCGGACGGT-GTTTTAGAGCTA- |
| | | CCGTCGTTGTACCGTCTACTTGAC- |
| | | TTTTTTTTcagccaactccaaTTTTTTTT- |
| | | GTCAAGTAGACGGTACAACGACGG |
| SOX9 | 1751 | g-ATTGGACCCGATTT-GTTTTAGAGCTA- |
| | | CCGTCGTTGTACCGTCTACTTGAC- |
| | | TTTTTTTTcagccaactccaaTTTTTTTT- |
| | | GTCAAGTAGACGGTACAACGACGG |
| SOX9 | 1752 | -GTGGCTCTAAGGTG-GTTTTAGAGCTA- |
| | | CCGTCGTTGTACCGTCTACTTGAC- |
| | | TTTTTTTTcagccaactccaaTTTTTTTT- |
| | | GTCAAGTAGACGGTACAACGACGG |
| SOX9 | 1753 | g-CAAACTTACACACT-GTTTTAGAGCTA- |
| | | CCTACACTCGACATCGGTAGCTA- |
| | | TTTTTTTTcagccaactccaaTTTTTTTT- |
| | | TAGCTACCGATGTCGAGTGTAGG |
| SOX9 | 1754 | g-AAAGGGCGGACGGT-GTTTTAGAGCTA- |
| | | CCTACACTCGACATCGGTAGCTA- |
| | | TTTTTTTTcagccaactccaaTTTTTTTT- |
| | | TAGCTACCGATGTCGAGTGTAGG |
| SOX9 | 1755 | g-ATTGGACCCGATTT-GTTTTAGAGCTA- |
| | | CCTACACTCGACATCGGTAGCTA- |
| | | TTTTTTTTcagccaactccaaTTTTTTTT- |
| | | TAGCTACCGATGTCGAGTGTAGG |
| SOX9 | 1756 | -GTGGCTCTAAGGTG-GTTTTAGAGCTA- |
| | | CCTACACTCGACATCGGTAGCTA- |
| | | TTTTTTTTcagccaactccaaTTTTTTTT- |
| | | TAGCTACCGATGTCGAGTGTAGG |
| SOX9 | 1757 | g-CAAACTTACACACT-GTTTTAGAGCTA- |
| | | CCCTGGCGGAACGTTCGAGTAAT- |
| | | TTTTTTTTcagccaactccaaTTTTTTTT- |
| | | ATTACTCGAACGTTCCGCCAGGG |
| SOX9 | 1758 | g-AAAGGGCGGACGGT-GTTTTAGAGCTA- |
| | | CCCTGGCGGAACGTTCGAGTAAT- |
| | | TTTTTTTTcagccaactccaaTTTTTTTT- |
| | | ATTACTCGAACGTTCCGCCAGGG |
| SOX9 | 1759 | g-ATTGGACCCGATTT-GTTTTAGAGCTA- |
| | | CCCTGGCGGAACGTTCGAGTAAT- |
| | | TTTTTTTTcagccaactccaaTTTTTTTT- |
| | | ATTACTCGAACGTTCCGCCAGGG |
| SOX9 | 1760 | -GTGGCTCTAAGGTG-GTTTTAGAGCTA- |
| | | CCCTGGCGGAACGTTCGAGTAAT- |
| | | TTTTTTTTcagccaactccaaTTTTTTTT- |
| | | ATTACTCGAACGTTCCGCCAGGG |
| SOX9 | 1761 | g-CAAACTTACACACT-GTTTTAGAGCTA- |
| | | CCTACACGATAGTGGTCGTGCGC- |
| | | TTTTTTTTcagccaactccaaTTTTTTTT- |
| | | GCGCACGACCACTATCGTGTAGG |
| SOX9 | 1762 | g-AAAGGGCGGACGGT-GTTTTAGAGCTA- |
| | | CCTACACGATAGTGGTCGTGCGC- |
| | | TTTTTTTTcagccaactccaaTTTTTTTT- |
| | | GCGCACGACCACTATCGTGTAGG |
| SOX9 | 1763 | g-ATTGGACCCGATTT-GTTTTAGAGCTA- |
| | | CCTACACGATAGTGGTCGTGCGC- |
| | | TTTTTTTTcagccaactccaaTTTTTTTT- |
| | | GCGCACGACCACTATCGTGTAGG |
| SOX9 | 1764 | -GTGGCTCTAAGGTG-GTTTTAGAGCTA- |
| | | CCTACACGATAGTGGTCGTGCGC- |
| | | TTTTTTTTcagccaactccaaTTTTTTTT- |
| | | GCGCACGACCACTATCGTGTAGG |
| SOX9 | 1765 | g-CAAACTTACACACT-GTTTTAGAGCTA- |
| | | CCTTCCCGACTTCCGTAGGAGCGC- |
| | | TTTTTTTTcagccaactccaaTTTTTTTT- |
| | | GCGCTCCTACGGAAGTCGGGAAGG |
| SOX9 | 1766 | g-AAAGGGCGGACGGT-GTTTTAGAGCTA- |
| | | CCTTCCCGACTTCCGTAGGAGCGC- |
| | | TTTTTTTTcagccaactccaaTTTTTTTT- |
| | | GCGCTCCTACGGAAGTCGGGAAGG |
| SOX9 | 1767 | g-ATTGGACCCGATTT-GTTTTAGAGCTA- |
| | | CCTTCCCGACTTCCGTAGGAGCGC- |
| | | TTTTTTTTcagccaactccaaTTTTTTTT- |
| | | GCGCTCCTACGGAAGTCGGGAAGG |
| SOX9 | 1768 | -GTGGCTCTAAGGTG-GTTTTAGAGCTA- |
| | | CCTTCCCGACTTCCGTAGGAGCGC- |
| | | TTTTTTTTcagccaactccaaTTTTTTTT- |
| | | GCGCTCCTACGGAAGTCGGGAAGG |
| SOX9 | 1769 | g-CAAACTTACACACT-GTTTTAGAGCTA- |
| | | CCTGAAGGTAAAGATCGGGTCCTC- |
| | | TTTTTTTTcagccaactccaaTTTTTTTT- |
| | | GAGGACCCGATCTTTACCTTCAGG |
| SOX9 | 1770 | g-AAAGGGCGGACGGT-GTTTTAGAGCTA- |
| | | CCTGAAGGTAAAGATCGGGTCCTC- |
| | | TTTTTTTTcagccaactccaaTTTTTTTT- |
| | | GAGGACCCGATCTTTACCTTCAGG |
| SOX9 | 1771 | g-ATTGGACCCGATTT-GTTTTAGAGCTA- |
| | | CCTGAAGGTAAAGATCGGGTCCTC- |
| | | TTTTTTTTcagccaactccaaTTTTTTTT- |
| | | GAGGACCCGATCTTTACCTTCAGG |
| SOX9 | 1772 | -GTGGCTCTAAGGTG-GTTTTAGAGCTA- |
| | | CCTGAAGGTAAAGATCGGGTCCTC- |
| | | TTTTTTTTcagccaactccaaTTTTTTTT- |
| | | GAGGACCCGATCTTTACCTTCAGG |
| SOX9 | 1773 | g-CAAACTTACACACT-GTTTTAGAGCTA- |
| | | CCTGGTTATAGCGGACGCACTGT- |
| | | TTTTTTTTcagccaactccaaTTTTTTTT- |
| | | ACAGTGCGTCCGCTATAACCAGG |
| SOX9 | 1774 | g-AAAGGGCGGACGGT-GTTTTAGAGCTA- |
| | | CCTGGTTATAGCGGACGCACTGT- |
| | | TTTTTTTTcagccaactccaaTTTTTTTT- |
| | | ACAGTGCGTCCGCTATAACCAGG |
| SOX9 | 1775 | g-ATTGGACCCGATTT-GTTTTAGAGCTA- |
| | | CCTGGTTATAGCGGACGCACTGT- |
| | | TTTTTTTTcagccaactccaaTTTTTTTT- |
| | | ACAGTGCGTCCGCTATAACCAGG |
| SOX9 | 1776 | -GTGGCTCTAAGGTG-GTTTTAGAGCTA- |
| | | CCTGGTTATAGCGGACGCACTGT- |
| | | TTTTTTTTcagccaactccaaTTTTTTTT- |
| | | ACAGTGCGTCCGCTATAACCAGG |
| SOX9 | 1777 | g-CAAACTTACACACT-GTTTTAGAGCTA- |
| | | CCGCATCGTATTATCTGCGAAGC- |
| | | TTTTTTTTcagccaactccaaTTTTTTTT- |
| | | GCTTCGCAGATAATACGATGCGG |
| SOX9 | 1778 | g-AAAGGGCGGACGGT-GTTTTAGAGCTA- |
| | | CCGCATCGTATTATCTGCGAAGC- |
| | | TTTTTTTTcagccaactccaaTTTTTTTT- |
| | | GCTTCGCAGATAATACGATGCGG |
| SOX9 | 1779 | g-ATTGGACCCGATTT-GTTTTAGAGCTA- |
| | | CCGCATCGTATTATCTGCGAAGC- |
| | | TTTTTTTTcagccaactccaaTTTTTTTT- |
| | | GCTTCGCAGATAATACGATGCGG |
| SOX9 | 1780 | -GTGGCTCTAAGGTG-GTTTTAGAGCTA- |
| | | CCGCATCGTATTATCTGCGAAGC- |
| | | TTTTTTTTcagccaactccaaTTTTTTTT- |
| | | GCTTCGCAGATAATACGATGCGG |
| SOX9 | 1781 | g-CAAACTTACACACT-GTTTTAGAGCTA- |
| | | CCGCTAGGACGTTCAACGGAGTC- |
| | | TTTTTTTTcagccaactccaaTTTTTTTT- |
| | | GACTCCGTTGAACGTCCTAGCGG |
| SOX9 | 1782 | g-AAAGGGCGGACGGT-GTTTTAGAGCTA- |
| | | CCGCTAGGACGTTCAACGGAGTC- |
| | | TTTTTTTTcagccaactccaaTTTTTTTT- |
| | | GACTCCGTTGAACGTCCTAGCGG |
| SOX9 | 1783 | g-ATTGGACCCGATTT-GTTTTAGAGCTA- |
| | | CCGCTAGGACGTTCAACGGAGTC- |
| | | TTTTTTTTcagccaactccaaTTTTTTTT- |
| | | GACTCCGTTGAACGTCCTAGCGG |
| SOX9 | 1784 | -GTGGCTCTAAGGTG-GTTTTAGAGCTA- |
| | | CCGCTAGGACGTTCAACGGAGTC- |
| | | TTTTTTTTcagccaactccaaTTTTTTTT- |
| | | GACTCCGTTGAACGTCCTAGCGG |
| SOX9 | 1785 | g-CAAACTTACACACT-GTTTTAGAGCTA- |
| | | CCATAGCGGTACTATCGGCATCT- |
| | | TTTTTTTTcagccaactccaaTTTTTTTT- |
| | | AGATGCCGATAGTACCGCTATGG |
| SOX9 | 1786 | g-AAAGGGCGGACGGT-GTTTTAGAGCTA- |
| | | CCATAGCGGTACTATCGGCATCT- |
| | | TTTTTTTTcagccaactccaaTTTTTTTT- |
| | | AGATGCCGATAGTACCGCTATGG |
| SOX9 | 1787 | g-ATTGGACCCGATTT-GTTTTAGAGCTA- |
| | | CCATAGCGGTACTATCGGCATCT- |
| | | TTTTTTTTcagccaactccaaTTTTTTTT- |
| | | AGATGCCGATAGTACCGCTATGG |
| SOX9 | 1788 | -GTGGCTCTAAGGTG-GTTTTAGAGCTA- |
| | | CCATAGCGGTACTATCGGCATCT- |
| | | TTTTTTTTcagccaactccaaTTTTTTTT- |
| | | AGATGCCGATAGTACCGCTATGG |
| SOX9 | 1789 | g-CAAACTTACACACT-GTTTTAGAGCTA- |
| | | CCTCGTACTAGTCTCGCATGACC- |
| | | TTTTTTTTcagccaactccaaTTTTTTTT- |
| | | GGTCATGCGAGACTAGTACGAGG |
| SOX9 | 1790 | g-AAAGGGCGGACGGT-GTTTTAGAGCTA- |
| | | CCTCGTACTAGTCTCGCATGACC- |
| | | TTTTTTTTcagccaactccaaTTTTTTTT- |
| | | GGTCATGCGAGACTAGTACGAGG |
| SOX9 | 1791 | g-ATTGGACCCGATTT-GTTTTAGAGCTA- |
| | | CCTCGTACTAGTCTCGCATGACC- |
| | | TTTTTTTTcagccaactccaaTTTTTTTT- |
| | | GGTCATGCGAGACTAGTACGAGG |
| SOX9 | 1792 | -GTGGCTCTAAGGTG-GTTTTAGAGCTA- |
| | | CCTCGTACTAGTCTCGCATGACC- |
| | | TTTTTTTTcagccaactccaaTTTTTTTT- |
| | | GGTCATGCGAGACTAGTACGAGG |
| SOX9 | 1793 | g-CAAACTTACACACT-GTTTTAGAGCTA- |
| | | CCGATAGTGCTAAACGACGCTTT- |
| | | TTTTTTTTcagccaactccaaTTTTTTTT- |
| | | AAAGCGTCGTTTAGCACTATCGG |
| SOX9 | 1794 | g-AAAGGGCGGACGGT-GTTTTAGAGCTA- |
| | | CCGATAGTGCTAAACGACGCTTT- |
| | | TTTTTTTTcagccaactccaaTTTTTTTT- |
| | | AAAGCGTCGTTTAGCACTATCGG |
| SOX9 | 1795 | g-ATTGGACCCGATTT-GTTTTAGAGCTA- |
| | | CCGATAGTGCTAAACGACGCTTT- |
| | | TTTTTTTTcagccaactccaaTTTTTTTT- |
| | | AAAGCGTCGTTTAGCACTATCGG |
| SOX9 | 1796 | -GTGGCTCTAAGGTG-GTTTTAGAGCTA- |
| | | CCGATAGTGCTAAACGACGCTTT- |
| | | TTTTTTTTcagccaactccaaTTTTTTTT- |
| | | AAAGCGTCGTTTAGCACTATCGG |
| SOX9 | 1797 | g-CAAACTTACACACT-GTTTTAGAGCTA- |
| | | CCCGTTATCGACGTTCAAGGAAC- |
| | | TTTTTTTTcagccaactccaaTTTTTTTT- |
| | | GTTCCTTGAACGTCGATAACGGG |
| SOX9 | 1798 | g-AAAGGGCGGACGGT-GTTTTAGAGCTA- |
| | | CCCGTTATCGACGTTCAAGGAAC- |
| | | TTTTTTTTcagccaactccaaTTTTTTTT- |
| | | GTTCCTTGAACGTCGATAACGGG |
| SOX9 | 1799 | g-ATTGGACCCGATTT-GTTTTAGAGCTA- |
| | | CCCGTTATCGACGTTCAAGGAAC- |
| | | TTTTTTTTcagccaactccaaTTTTTTTT- |
| | | GTTCCTTGAACGTCGATAACGGG |
| SOX9 | 1800 | -GTGGCTCTAAGGTG-GTTTTAGAGCTA- |
| | | CCCGTTATCGACGTTCAAGGAAC- |
| | | TTTTTTTTcagccaactccaaTTTTTTTT- |
| | | GTTCCTTGAACGTCGATAACGGG |
| SOX9 | 1801 | g-CAAACTTACACACT-GTTTTAGAGCTA- |
| | | CCGATCAATGCGGTCTGCGTAAC- |
| | | TTTTTTTTcagccaactccaaTTTTTTTT- |
| | | GTTACGCAGACCGCATTGATCGG |
| SOX9 | 1802 | g-AAAGGGCGGACGGT-GTTTTAGAGCTA- |
| | | CCGATCAATGCGGTCTGCGTAAC- |
| | | TTTTTTTTcagccaactccaaTTTTTTTT- |
| | | GTTACGCAGACCGCATTGATCGG |
| SOX9 | 1803 | g-ATTGGACCCGATTT-GTTTTAGAGCTA- |
| | | CCGATCAATGCGGTCTGCGTAAC- |
| | | TTTTTTTTcagccaactccaaTTTTTTTT- |
| | | GTTACGCAGACCGCATTGATCGG |
| SOX9 | 1804 | -GTGGCTCTAAGGTG-GTTTTAGAGCTA- |
| | | CCGATCAATGCGGTCTGCGTAAC- |
| | | TTTTTTTTcagccaactccaaTTTTTTTT- |
| | | GTTACGCAGACCGCATTGATCGG |
| SOX9 | 1805 | g-CAAACTTACACACT-GTTTTAGAGCTA- |
| | | CCCTTACTCGCGATACTCTCGAC- |
| | | TTTTTTTTcagccaactccaaTTTTTTTT- |
| | | GTCGAGAGTATCGCGAGTAAGGG |
| SOX9 | 1806 | g-AAAGGGCGGACGGT-GTTTTAGAGCTA- |
| | | CCCTTACTCGCGATACTCTCGAC- |
| | | TTTTTTTTcagccaactccaaTTTTTTTT- |
| | | GTCGAGAGTATCGCGAGTAAGGG |
| SOX9 | 1807 | g-ATTGGACCCGATTT-GTTTTAGAGCTA- |
| | | CCCTTACTCGCGATACTCTCGAC- |
| | | TTTTTTTTcagccaactccaaTTTTTTTT- |
| | | GTCGAGAGTATCGCGAGTAAGGG |
| SOX9 | 1808 | -GTGGCTCTAAGGTG-GTTTTAGAGCTA- |
| | | CCCTTACTCGCGATACTCTCGAC- |
| | | TTTTTTTTcagccaactccaaTTTTTTTT- |
| | | GTCGAGAGTATCGCGAGTAAGGG |
| SOX9 | 1809 | g-CAAACTTACACACT-GTTTTAGAGCTA- |
| | | CCGCGGACGGTAAGCACGGAATA- |
| | | TTTTTTTTcagccaactccaaTTTTTTTT- |
| | | TATTCCGTGCTTACCGTCCGCGG |
| SOX9 | 1810 | g-AAAGGGCGGACGGT-GTTTTAGAGCTA- |
| | | CCGCGGACGGTAAGCACGGAATA- |
| | | TTTTTTTTcagccaactccaaTTTTTTTT- |
| | | TATTCCGTGCTTACCGTCCGCGG |
| SOX9 | 1811 | g-ATTGGACCCGATTT-GTTTTAGAGCTA- |
| | | CCGCGGACGGTAAGCACGGAATA- |
| | | TTTTTTTTcagccaactccaaTTTTTTTT- |
| | | TATTCCGTGCTTACCGTCCGCGG |
| SOX9 | 1812 | -GTGGCTCTAAGGTG-GTTTTAGAGCTA- |
| | | CCGCGGACGGTAAGCACGGAATA- |
| | | TTTTTTTTcagccaactccaaTTTTTTTT- |
| | | TATTCCGTGCTTACCGTCCGCGG |
| SOX9 | 1813 | g-CAAACTTACACACT-GTTTTAGAGCTA- |
| | | CCTATAGTCACGAATCGTAGGGT- |
| | | TTTTTTTTcagccaactccaaTTTTTTTT- |
| | | ACCCTACGATTCGTGACTATAGG |
| SOX9 | 1814 | g-AAAGGGCGGACGGT-GTTTTAGAGCTA- |
| | | CCTATAGTCACGAATCGTAGGGT- |
| | | TTTTTTTTcagccaactccaaTTTTTTTT- |
| | | ACCCTACGATTCGTGACTATAGG |
| SOX9 | 1815 | g-ATTGGACCCGATTT-GTTTTAGAGCTA- |
| | | CCTATAGTCACGAATCGTAGGGT- |
| | | TTTTTTTTcagccaactccaaTTTTTTTT- |
| | | ACCCTACGATTCGTGACTATAGG |
| SOX9 | 1816 | -GTGGCTCTAAGGTG-GTTTTAGAGCTA- |
| | | CCTATAGTCACGAATCGTAGGGT- |
| | | TTTTTTTTcagccaactccaaTTTTTTTT- |
| | | ACCCTACGATTCGTGACTATAGG |
| SOX9 | 1817 | g-CAAACTTACACACT-GTTTTAGAGCTA- |
| | | CCCGTCGTCACGTATGCGTAGCA- |
| | | TTTTTTTTcagccaactccaaTTTTTTTT- |
| | | TGCTACGCATACGTGACGACGGG |
| SOX9 | 1818 | g-AAAGGGCGGACGGT-GTTTTAGAGCTA- |
| | | CCCGTCGTCACGTATGCGTAGCA- |
| | | TTTTTTTTcagccaactccaaTTTTTTTT- |
| | | TGCTACGCATACGTGACGACGGG |
| SOX9 | 1819 | g-ATTGGACCCGATTT-GTTTTAGAGCTA- |
| | | CCCGTCGTCACGTATGCGTAGCA- |
| | | TTTTTTTTcagccaactccaaTTTTTTTT- |
| | | TGCTACGCATACGTGACGACGGG |
| SOX9 | 1820 | -GTGGCTCTAAGGTG-GTTTTAGAGCTA- |
| | | CCCGTCGTCACGTATGCGTAGCA- |
| | | TTTTTTTTcagccaactccaaTTTTTTTT- |
| | | TGCTACGCATACGTGACGACGGG |
| SOX9 | 1821 | g-CAAACTTACACACT-GTTTTAGAGCTA- |
| | | CCCGAGAGGTAGTAGACGACGCA- |
| | | TTTTTTTTcagccaactccaaTTTTTTTT- |
| | | TGCGTCGTCTACTACCTCTCGGG |
| SOX9 | 1822 | g-AAAGGGCGGACGGT-GTTTTAGAGCTA- |
| | | CCCGAGAGGTAGTAGACGACGCA- |
| | | TTTTTTTTcagccaactccaaTTTTTTTT- |
| | | TGCGTCGTCTACTACCTCTCGGG |
| SOX9 | 1823 | g-ATTGGACCCGATTT-GTTTTAGAGCTA- |
| | | CCCGAGAGGTAGTAGACGACGCA- |
| | | TTTTTTTTcagccaactccaaTTTTTTTT- |
| | | TGCGTCGTCTACTACCTCTCGGG |
| SOX9 | 1824 | -GTGGCTCTAAGGTG-GTTTTAGAGCTA- |
| | | CCCGAGAGGTAGTAGACGACGCA- |
| | | TTTTTTTTcagccaactccaaTTTTTTTT- |
| | | TGCGTCGTCTACTACCTCTCGGG |
| SOX9 | 1825 | g-CAAACTTACACACT-GTTTTAGAGCTA- |
| | | CCGACGTCTACGGACGGGAGCTA- |
| | | TTTTTTTTcagccaactccaaTTTTTTTT- |
| | | TAGCTCCCGTCCGTAGACGTCGG |
| SOX9 | 1826 | g-AAAGGGCGGACGGT-GTTTTAGAGCTA- |
| | | CCGACGTCTACGGACGGGAGCTA- |
| | | TTTTTTTTcagccaactccaaTTTTTTTT- |
| | | TAGCTCCCGTCCGTAGACGTCGG |
| SOX9 | 1827 | g-ATTGGACCCGATTT-GTTTTAGAGCTA- |
| | | CCGACGTCTACGGACGGGAGCTA- |
| | | TTTTTTTTcagccaactccaaTTTTTTTT- |
| | | TAGCTCCCGTCCGTAGACGTCGG |
| SOX9 | 1828 | -GTGGCTCTAAGGTG-GTTTTAGAGCTA- |
| | | CCGACGTCTACGGACGGGAGCTA- |
| | | TTTTTTTTcagccaactccaaTTTTTTTT- |
| | | TAGCTCCCGTCCGTAGACGTCGG |
| SOX9 | 1829 | g-CAAACTTACACACT-GTTTTAGAGCTA- |
| | | CCAAAGCTCATTCGCGACTGAGC- |
| | | TTTTTTTTcagccaactccaaTTTTTTTT- |
| | | GCTCAGTCGCGAATGAGCTTTGG |
| SOX9 | 1830 | g-AAAGGGCGGACGGT-GTTTTAGAGCTA- |
| | | CCAAAGCTCATTCGCGACTGAGC- |
| | | TTTTTTTTcagccaactccaaTTTTTTTT- |
| | | GCTCAGTCGCGAATGAGCTTTGG |
| SOX9 | 1831 | g-ATTGGACCCGATTT-GTTTTAGAGCTA- |
| | | CCAAAGCTCATTCGCGACTGAGC- |
| | | TTTTTTTTcagccaactccaaTTTTTTTT- |
| | | GCTCAGTCGCGAATGAGCTTTGG |
| SOX9 | 1832 | -GTGGCTCTAAGGTG-GTTTTAGAGCTA- |
| | | CCAAAGCTCATTCGCGACTGAGC- |
| | | TTTTTTTTcagccaactccaaTTTTTTTT- |
| | | GCTCAGTCGCGAATGAGCTTTGG |
| SOX9 | 1833 | g-CAAACTTACACACT-GTTTTAGAGCTA- |
| | | CCATGGCACGATCGACACGGAGG- |
| | | TTTTTTTTcagccaactccaaTTTTTTTT- |
| | | CCTCCGTGTCGATCGTGCCATGG |
| SOX9 | 1834 | g-AAAGGGCGGACGGT-GTTTTAGAGCTA- |
| | | CCATGGCACGATCGACACGGAGG- |
| | | TTTTTTTTcagccaactccaaTTTTTTTT- |
| | | CCTCCGTGTCGATCGTGCCATGG |
| SOX9 | 1835 | g-ATTGGACCCGATTT-GTTTTAGAGCTA- |
| | | CCATGGCACGATCGACACGGAGG- |
| | | TTTTTTTTcagccaactccaaTTTTTTTT- |
| | | CCTCCGTGTCGATCGTGCCATGG |
| SOX9 | 1836 | -GTGGCTCTAAGGTG-GTTTTAGAGCTA- |
| | | CCATGGCACGATCGACACGGAGG- |
| | | TTTTTTTTcagccaactccaaTTTTTTTT- |
| | | CCTCCGTGTCGATCGTGCCATGG |
| SOX9 | 1837 | g-CAAACTTACACACT-GTTTTAGAGCTA- |
| | | CCCGAACTCTCTATCGAACGAGT- |
| | | TTTTTTTTcagccaactccaaTTTTTTTT- |
| | | ACTCGTTCGATAGAGAGTTCGGG |
| SOX9 | 1838 | g-AAAGGGCGGACGGT-GTTTTAGAGCTA- |
| | | CCCGAACTCTCTATCGAACGAGT- |
| | | TTTTTTTTcagccaactccaaTTTTTTTT- |
| | | ACTCGTTCGATAGAGAGTTCGGG |
| SOX9 | 1839 | g-ATTGGACCCGATTT-GTTTTAGAGCTA- |
| | | CCCGAACTCTCTATCGAACGAGT- |
| | | TTTTTTTTcagccaactccaaTTTTTTTT- |
| | | ACTCGTTCGATAGAGAGTTCGGG |
| SOX9 | 1840 | -GTGGCTCTAAGGTG-GTTTTAGAGCTA- |
| | | CCCGAACTCTCTATCGAACGAGT- |
| | | TTTTTTTTcagccaactccaaTTTTTTTT- |
| | | ACTCGTTCGATAGAGAGTTCGGG |
| SST | 1841 | -GTGCGTAAAAGGGC-GTTTTAGAGCTA- |
| | | CCGTCGTTGTACCGTCTACTTGAC- |
| | | TTTTTTTTcagccaactccaaTTTTTTTT- |
| | | GTCAAGTAGACGGTACAACGACGG |
| SST | 1842 | -GGCATGTGTATGGT-GTTTTAGAGCTA- |
| | | CCGTCGTTGTACCGTCTACTTGAC- |
| | | TTTTTTTTcagccaactccaaTTTTTTTT- |
| | | GTCAAGTAGACGGTACAACGACGG |
| SST | 1843 | -GACAAGATCTAAAG-GTTTTAGAGCTA- |
| | | CCGTCGTTGTACCGTCTACTTGAC- |
| | | TTTTTTTTcagccaactccaaTTTTTTTT- |
| | | GTCAAGTAGACGGTACAACGACGG |
| SST | 1844 | g-TTGTATAAATCGTG-GTTTTAGAGCTA- |
| | | CCGTCGTTGTACCGTCTACTTGAC- |
| | | TTTTTTTTcagccaactccaaTTTTTTTT- |
| | | GTCAAGTAGACGGTACAACGACGG |
| SST | 1845 | -GTGCGTAAAAGGGC-GTTTTAGAGCTA- |
| | | CCTACACTCGACATCGGTAGCTA- |
| | | TTTTTTTTcagccaactccaaTTTTTTTT- |
| | | TAGCTACCGATGTCGAGTGTAGG |
| SST | 1846 | -GGCATGTGTATGGT-GTTTTAGAGCTA- |
| | | CCTACACTCGACATCGGTAGCTA- |
| | | TTTTTTTTcagccaactccaaTTTTTTTT- |
| | | TAGCTACCGATGTCGAGTGTAGG |
| SST | 1847 | -GACAAGATCTAAAG-GTTTTAGAGCTA- |
| | | CCTACACTCGACATCGGTAGCTA- |
| | | TTTTTTTTcagccaactccaaTTTTTTTT- |
| | | TAGCTACCGATGTCGAGTGTAGG |
| SST | 1848 | g-TTGTATAAATCGTG-GTTTTAGAGCTA- |
| | | CCTACACTCGACATCGGTAGCTA- |
| | | TTTTTTTTcagccaactccaaTTTTTTTT- |
| | | TAGCTACCGATGTCGAGTGTAGG |
| SST | 1849 | -GTGCGTAAAAGGGC-GTTTTAGAGCTA- |
| | | CCCTGGCGGAACGTTCGAGTAAT- |
| | | TTTTTTTTcagccaactccaaTTTTTTTT- |
| | | ATTACTCGAACGTTCCGCCAGGG |
| SST | 1850 | -GGCATGTGTATGGT-GTTTTAGAGCTA- |
| | | CCCTGGCGGAACGTTCGAGTAAT- |
| | | TTTTTTTTcagccaactccaaTTTTTTTT- |
| | | ATTACTCGAACGTTCCGCCAGGG |
| SST | 1851 | -GACAAGATCTAAAG-GTTTTAGAGCTA- |
| | | CCCTGGCGGAACGTTCGAGTAAT- |
| | | TTTTTTTTcagccaactccaaTTTTTTTT- |
| | | ATTACTCGAACGTTCCGCCAGGG |
| SST | 1852 | g-TTGTATAAATCGTG-GTTTTAGAGCTA- |
| | | CCCTGGCGGAACGTTCGAGTAAT- |
| | | TTTTTTTTcagccaactccaaTTTTTTTT- |
| | | ATTACTCGAACGTTCCGCCAGGG |
| SST | 1853 | -GTGCGTAAAAGGGC-GTTTTAGAGCTA- |
| | | CCTACACGATAGTGGTCGTGCGC- |
| | | TTTTTTTTcagccaactccaaTTTTTTTT- |
| | | GCGCACGACCACTATCGTGTAGG |
| SST | 1854 | -GGCATGTGTATGGT-GTTTTAGAGCTA- |
| | | CCTACACGATAGTGGTCGTGCGC- |
| | | TTTTTTTTcagccaactccaaTTTTTTTT- |
| | | GCGCACGACCACTATCGTGTAGG |
| SST | 1855 | -GACAAGATCTAAAG-GTTTTAGAGCTA- |
| | | CCTACACGATAGTGGTCGTGCGC- |
| | | TTTTTTTTcagccaactccaaTTTTTTTT- |
| | | GCGCACGACCACTATCGTGTAGG |
| SST | 1856 | g-TTGTATAAATCGTG-GTTTTAGAGCTA- |
| | | CCTACACGATAGTGGTCGTGCGC- |
| | | TTTTTTTTcagccaactccaaTTTTTTTT- |
| | | GCGCACGACCACTATCGTGTAGG |
| SST | 1857 | -GTGCGTAAAAGGGC-GTTTTAGAGCTA- |
| | | CCTTCCCGACTTCCGTAGGAGCGC- |
| | | TTTTTTTTcagccaactccaaTTTTTTTT- |
| | | GCGCTCCTACGGAAGTCGGGAAGG |
| SST | 1858 | -GGCATGTGTATGGT-GTTTTAGAGCTA- |
| | | CCTTCCCGACTTCCGTAGGAGCGC- |
| | | TTTTTTTTcagccaactccaaTTTTTTTT- |
| | | GCGCTCCTACGGAAGTCGGGAAGG |
| SST | 1859 | -GACAAGATCTAAAG-GTTTTAGAGCTA- |
| | | CCTTCCCGACTTCCGTAGGAGCGC- |
| | | TTTTTTTTcagccaactccaaTTTTTTTT- |
| | | GCGCTCCTACGGAAGTCGGGAAGG |
| SST | 1860 | g-TTGTATAAATCGTG-GTTTTAGAGCTA- |
| | | CCTTCCCGACTTCCGTAGGAGCGC- |
| | | TTTTTTTTcagccaactccaaTTTTTTTT- |
| | | GCGCTCCTACGGAAGTCGGGAAGG |
| SST | 1861 | -GTGCGTAAAAGGGC-GTTTTAGAGCTA- |
| | | CCTGAAGGTAAAGATCGGGTCCTC- |
| | | TTTTTTTTcagccaactccaaTTTTTTTT- |
| | | GAGGACCCGATCTTTACCTTCAGG |
| SST | 1862 | -GGCATGTGTATGGT-GTTTTAGAGCTA- |
| | | CCTGAAGGTAAAGATCGGGTCCTC- |
| | | TTTTTTTTcagccaactccaaTTTTTTTT- |
| | | GAGGACCCGATCTTTACCTTCAGG |
| SST | 1863 | -GACAAGATCTAAAG-GTTTTAGAGCTA- |
| | | CCTGAAGGTAAAGATCGGGTCCTC- |
| | | TTTTTTTTcagccaactccaaTTTTTTTT- |
| | | GAGGACCCGATCTTTACCTTCAGG |
| SST | 1864 | g-TTGTATAAATCGTG-GTTTTAGAGCTA- |
| | | CCTGAAGGTAAAGATCGGGTCCTC- |
| | | TTTTTTTTcagccaactccaaTTTTTTTT- |
| | | GAGGACCCGATCTTTACCTTCAGG |
| SST | 1865 | -GTGCGTAAAAGGGC-GTTTTAGAGCTA- |
| | | CCTGGTTATAGCGGACGCACTGT- |
| | | TTTTTTTTcagccaactccaaTTTTTTTT- |
| | | ACAGTGCGTCCGCTATAACCAGG |
| SST | 1866 | -GGCATGTGTATGGT-GTTTTAGAGCTA- |
| | | CCTGGTTATAGCGGACGCACTGT- |
| | | TTTTTTTTcagccaactccaaTTTTTTTT- |
| | | ACAGTGCGTCCGCTATAACCAGG |
| SST | 1867 | -GACAAGATCTAAAG-GTTTTAGAGCTA- |
| | | CCTGGTTATAGCGGACGCACTGT- |
| | | TTTTTTTTcagccaactccaaTTTTTTTT- |
| | | ACAGTGCGTCCGCTATAACCAGG |
| SST | 1868 | g-TTGTATAAATCGTG-GTTTTAGAGCTA- |
| | | CCTGGTTATAGCGGACGCACTGT- |
| | | TTTTTTTTcagccaactccaaTTTTTTTT- |
| | | ACAGTGCGTCCGCTATAACCAGG |
| SST | 1869 | -GTGCGTAAAAGGGC-GTTTTAGAGCTA- |
| | | CCGCATCGTATTATCTGCGAAGC- |
| | | TTTTTTTTcagccaactccaaTTTTTTTT- |
| | | GCTTCGCAGATAATACGATGCGG |
| SST | 1870 | -GGCATGTGTATGGT-GTTTTAGAGCTA- |
| | | CCGCATCGTATTATCTGCGAAGC- |
| | | TTTTTTTTcagccaactccaaTTTTTTTT- |
| | | GCTTCGCAGATAATACGATGCGG |
| SST | 1871 | -GACAAGATCTAAAG-GTTTTAGAGCTA- |
| | | CCGCATCGTATTATCTGCGAAGC- |
| | | TTTTTTTTcagccaactccaaTTTTTTTT- |
| | | GCTTCGCAGATAATACGATGCGG |
| SST | 1872 | g-TTGTATAAATCGTG-GTTTTAGAGCTA- |
| | | CCGCATCGTATTATCTGCGAAGC- |
| | | TTTTTTTTcagccaactccaaTTTTTTTT- |
| | | GCTTCGCAGATAATACGATGCGG |
| SST | 1873 | -GTGCGTAAAAGGGC-GTTTTAGAGCTA- |
| | | CCGCTAGGACGTTCAACGGAGTC- |
| | | TTTTTTTTcagccaactccaaTTTTTTTT- |
| | | GACTCCGTTGAACGTCCTAGCGG |
| SST | 1874 | -GGCATGTGTATGGT-GTTTTAGAGCTA- |
| | | CCGCTAGGACGTTCAACGGAGTC- |
| | | TTTTTTTTcagccaactccaaTTTTTTTT- |
| | | GACTCCGTTGAACGTCCTAGCGG |
| SST | 1875 | -GACAAGATCTAAAG-GTTTTAGAGCTA- |
| | | CCGCTAGGACGTTCAACGGAGTC- |
| | | TTTTTTTTcagccaactccaaTTTTTTTT- |
| | | GACTCCGTTGAACGTCCTAGCGG |
| SST | 1876 | g-TTGTATAAATCGTG-GTTTTAGAGCTA- |
| | | CCGCTAGGACGTTCAACGGAGTC- |
| | | TTTTTTTTcagccaactccaaTTTTTTTT- |
| | | GACTCCGTTGAACGTCCTAGCGG |
| SST | 1877 | -GTGCGTAAAAGGGC-GTTTTAGAGCTA- |
| | | CCATAGCGGTACTATCGGCATCT- |
| | | TTTTTTTTcagccaactccaaTTTTTTTT- |
| | | AGATGCCGATAGTACCGCTATGG |
| SST | 1878 | -GGCATGTGTATGGT-GTTTTAGAGCTA- |
| | | CCATAGCGGTACTATCGGCATCT- |
| | | TTTTTTTTcagccaactccaaTTTTTTTT- |
| | | AGATGCCGATAGTACCGCTATGG |
| SST | 1879 | -GACAAGATCTAAAG-GTTTTAGAGCTA- |
| | | CCATAGCGGTACTATCGGCATCT- |
| | | TTTTTTTTcagccaactccaaTTTTTTTT- |
| | | AGATGCCGATAGTACCGCTATGG |
| SST | 1880 | g-TTGTATAAATCGTG-GTTTTAGAGCTA- |
| | | CCATAGCGGTACTATCGGCATCT- |
| | | TTTTTTTTcagccaactccaaTTTTTTTT- |
| | | AGATGCCGATAGTACCGCTATGG |
| SST | 1881 | -GTGCGTAAAAGGGC-GTTTTAGAGCTA- |
| | | CCTCGTACTAGTCTCGCATGACC- |
| | | TTTTTTTTcagccaactccaaTTTTTTTT- |
| | | GGTCATGCGAGACTAGTACGAGG |
| SST | 1882 | -GGCATGTGTATGGT-GTTTTAGAGCTA- |
| | | CCTCGTACTAGTCTCGCATGACC- |
| | | TTTTTTTTcagccaactccaaTTTTTTTT- |
| | | GGTCATGCGAGACTAGTACGAGG |
| SST | 1883 | -GACAAGATCTAAAG-GTTTTAGAGCTA- |
| | | CCTCGTACTAGTCTCGCATGACC- |
| | | TTTTTTTTcagccaactccaaTTTTTTTT- |
| | | GGTCATGCGAGACTAGTACGAGG |
| SST | 1884 | g-TTGTATAAATCGTG-GTTTTAGAGCTA- |
| | | CCTCGTACTAGTCTCGCATGACC- |
| | | TTTTTTTTcagccaactccaaTTTTTTTT- |
| | | GGTCATGCGAGACTAGTACGAGG |
| SST | 1885 | -GTGCGTAAAAGGGC-GTTTTAGAGCTA- |
| | | CCGATAGTGCTAAACGACGCTTT- |
| | | TTTTTTTTcagccaactccaaTTTTTTTT- |
| | | AAAGCGTCGTTTAGCACTATCGG |
| SST | 1886 | -GGCATGTGTATGGT-GTTTTAGAGCTA- |
| | | CCGATAGTGCTAAACGACGCTTT- |
| | | TTTTTTTTcagccaactccaaTTTTTTTT- |
| | | AAAGCGTCGTTTAGCACTATCGG |
| SST | 1887 | -GACAAGATCTAAAG-GTTTTAGAGCTA- |
| | | CCGATAGTGCTAAACGACGCTTT- |
| | | TTTTTTTTcagccaactccaaTTTTTTTT- |
| | | AAAGCGTCGTTTAGCACTATCGG |
| SST | 1888 | g-TTGTATAAATCGTG-GTTTTAGAGCTA- |
| | | CCGATAGTGCTAAACGACGCTTT- |
| | | TTTTTTTTcagccaactccaaTTTTTTTT- |
| | | AAAGCGTCGTTTAGCACTATCGG |
| SST | 1889 | -GTGCGTAAAAGGGC-GTTTTAGAGCTA- |
| | | CCCGTTATCGACGTTCAAGGAAC- |
| | | TTTTTTTTcagccaactccaaTTTTTTTT- |
| | | GTTCCTTGAACGTCGATAACGGG |
| SST | 1890 | -GGCATGTGTATGGT-GTTTTAGAGCTA- |
| | | CCCGTTATCGACGTTCAAGGAAC- |
| | | TTTTTTTTcagccaactccaaTTTTTTTT- |
| | | GTTCCTTGAACGTCGATAACGGG |
| SST | 1891 | -GACAAGATCTAAAG-GTTTTAGAGCTA- |
| | | CCCGTTATCGACGTTCAAGGAAC- |
| | | TTTTTTTTcagccaactccaaTTTTTTTT- |
| | | GTTCCTTGAACGTCGATAACGGG |
| SST | 1892 | g-TTGTATAAATCGTG-GTTTTAGAGCTA- |
| | | CCCGTTATCGACGTTCAAGGAAC- |
| | | TTTTTTTTcagccaactccaaTTTTTTTT- |
| | | GTTCCTTGAACGTCGATAACGGG |
| SST | 1893 | -GTGCGTAAAAGGGC-GTTTTAGAGCTA- |
| | | CCGATCAATGCGGTCTGCGTAAC- |
| | | TTTTTTTTcagccaactccaaTTTTTTTT- |
| | | GTTACGCAGACCGCATTGATCGG |
| SST | 1894 | -GGCATGTGTATGGT-GTTTTAGAGCTA- |
| | | CCGATCAATGCGGTCTGCGTAAC- |
| | | TTTTTTTTcagccaactccaaTTTTTTTT- |
| | | GTTACGCAGACCGCATTGATCGG |
| SST | 1895 | -GACAAGATCTAAAG-GTTTTAGAGCTA- |
| | | CCGATCAATGCGGTCTGCGTAAC- |
| | | TTTTTTTTcagccaactccaaTTTTTTTT- |
| | | GTTACGCAGACCGCATTGATCGG |
| SST | 1896 | g-TTGTATAAATCGTG-GTTTTAGAGCTA- |
| | | CCGATCAATGCGGTCTGCGTAAC- |
| | | TTTTTTTTcagccaactccaaTTTTTTTT- |
| | | GTTACGCAGACCGCATTGATCGG |
| SST | 1897 | -GTGCGTAAAAGGGC-GTTTTAGAGCTA- |
| | | CCCTTACTCGCGATACTCTCGAC- |
| | | TTTTTTTTcagccaactccaaTTTTTTTT- |
| | | GTCGAGAGTATCGCGAGTAAGGG |
| SST | 1898 | -GGCATGTGTATGGT-GTTTTAGAGCTA- |
| | | CCCTTACTCGCGATACTCTCGAC- |
| | | TTTTTTTTcagccaactccaaTTTTTTTT- |
| | | GTCGAGAGTATCGCGAGTAAGGG |
| SST | 1899 | -GACAAGATCTAAAG-GTTTTAGAGCTA- |
| | | CCCTTACTCGCGATACTCTCGAC- |
| | | TTTTTTTTcagccaactccaaTTTTTTTT- |
| | | GTCGAGAGTATCGCGAGTAAGGG |
| SST | 1900 | g-TTGTATAAATCGTG-GTTTTAGAGCTA- |
| | | CCCTTACTCGCGATACTCTCGAC- |
| | | TTTTTTTTcagccaactccaaTTTTTTTT- |
| | | GTCGAGAGTATCGCGAGTAAGGG |
| SST | 1901 | -GTGCGTAAAAGGGC-GTTTTAGAGCTA- |
| | | CCGCGGACGGTAAGCACGGAATA- |
| | | TTTTTTTTcagccaactccaaTTTTTTTT- |
| | | TATTCCGTGCTTACCGTCCGCGG |
| SST | 1902 | -GGCATGTGTATGGT-GTTTTAGAGCTA- |
| | | CCGCGGACGGTAAGCACGGAATA- |
| | | TTTTTTTTcagccaactccaaTTTTTTTT- |
| | | TATTCCGTGCTTACCGTCCGCGG |
| SST | 1903 | -GACAAGATCTAAAG-GTTTTAGAGCTA- |
| | | CCGCGGACGGTAAGCACGGAATA- |
| | | TTTTTTTTcagccaactccaaTTTTTTTT- |
| | | TATTCCGTGCTTACCGTCCGCGG |
| SST | 1904 | g-TTGTATAAATCGTG-GTTTTAGAGCTA- |
| | | CCGCGGACGGTAAGCACGGAATA- |
| | | TTTTTTTTcagccaactccaaTTTTTTTT- |
| | | TATTCCGTGCTTACCGTCCGCGG |
| SST | 1905 | -GTGCGTAAAAGGGC-GTTTTAGAGCTA- |
| | | CCTATAGTCACGAATCGTAGGGT- |
| | | TTTTTTTTcagccaactccaaTTTTTTTT- |
| | | ACCCTACGATTCGTGACTATAGG |
| SST | 1906 | -GGCATGTGTATGGT-GTTTTAGAGCTA- |
| | | CCTATAGTCACGAATCGTAGGGT- |
| | | TTTTTTTTcagccaactccaaTTTTTTTT- |
| | | ACCCTACGATTCGTGACTATAGG |
| SST | 1907 | -GACAAGATCTAAAG-GTTTTAGAGCTA- |
| | | CCTATAGTCACGAATCGTAGGGT- |
| | | TTTTTTTTcagccaactccaaTTTTTTTT- |
| | | ACCCTACGATTCGTGACTATAGG |
| SST | 1908 | g-TTGTATAAATCGTG-GTTTTAGAGCTA- |
| | | CCTATAGTCACGAATCGTAGGGT- |
| | | TTTTTTTTcagccaactccaaTTTTTTTT- |
| | | ACCCTACGATTCGTGACTATAGG |
| SST | 1909 | -GTGCGTAAAAGGGC-GTTTTAGAGCTA- |
| | | CCCGTCGTCACGTATGCGTAGCA- |
| | | TTTTTTTTcagccaactccaaTTTTTTTT- |
| | | TGCTACGCATACGTGACGACGGG |
| SST | 1910 | -GGCATGTGTATGGT-GTTTTAGAGCTA- |
| | | CCCGTCGTCACGTATGCGTAGCA- |
| | | TTTTTTTTcagccaactccaaTTTTTTTT- |
| | | TGCTACGCATACGTGACGACGGG |
| SST | 1911 | -GACAAGATCTAAAG-GTTTTAGAGCTA- |
| | | CCCGTCGTCACGTATGCGTAGCA- |
| | | TTTTTTTTcagccaactccaaTTTTTTTT- |
| | | TGCTACGCATACGTGACGACGGG |
| SST | 1912 | g-TTGTATAAATCGTG-GTTTTAGAGCTA- |
| | | CCCGTCGTCACGTATGCGTAGCA- |
| | | TTTTTTTTcagccaactccaaTTTTTTTT- |
| | | TGCTACGCATACGTGACGACGGG |
| SST | 1913 | -GTGCGTAAAAGGGC-GTTTTAGAGCTA- |
| | | CCCGAGAGGTAGTAGACGACGCA- |
| | | TTTTTTTTcagccaactccaaTTTTTTTT- |
| | | TGCGTCGTCTACTACCTCTCGGG |
| SST | 1914 | -GGCATGTGTATGGT-GTTTTAGAGCTA- |
| | | CCCGAGAGGTAGTAGACGACGCA- |
| | | TTTTTTTTcagccaactccaaTTTTTTTT- |
| | | TGCGTCGTCTACTACCTCTCGGG |
| SST | 1915 | -GACAAGATCTAAAG-GTTTTAGAGCTA- |
| | | CCCGAGAGGTAGTAGACGACGCA- |
| | | TTTTTTTTcagccaactccaaTTTTTTTT- |
| | | TGCGTCGTCTACTACCTCTCGGG |
| SST | 1916 | g-TTGTATAAATCGTG-GTTTTAGAGCTA- |
| | | CCCGAGAGGTAGTAGACGACGCA- |
| | | TTTTTTTTcagccaactccaaTTTTTTTT- |
| | | TGCGTCGTCTACTACCTCTCGGG |
| SST | 1917 | -GTGCGTAAAAGGGC-GTTTTAGAGCTA- |
| | | CCGACGTCTACGGACGGGAGCTA- |
| | | TTTTTTTTcagccaactccaaTTTTTTTT- |
| | | TAGCTCCCGTCCGTAGACGTCGG |
| SST | 1918 | -GGCATGTGTATGGT-GTTTTAGAGCTA- |
| | | CCGACGTCTACGGACGGGAGCTA- |
| | | TTTTTTTTcagccaactccaaTTTTTTTT- |
| | | TAGCTCCCGTCCGTAGACGTCGG |
| SST | 1919 | -GACAAGATCTAAAG-GTTTTAGAGCTA- |
| | | CCGACGTCTACGGACGGGAGCTA- |
| | | TTTTTTTTcagccaactccaaTTTTTTTT- |
| | | TAGCTCCCGTCCGTAGACGTCGG |
| SST | 1920 | g-TTGTATAAATCGTG-GTTTTAGAGCTA- |
| | | CCGACGTCTACGGACGGGAGCTA- |
| | | TTTTTTTTcagccaactccaaTTTTTTTT- |
| | | TAGCTCCCGTCCGTAGACGTCGG |
| SST | 1921 | -GTGCGTAAAAGGGC-GTTTTAGAGCTA- |
| | | CCAAAGCTCATTCGCGACTGAGC- |
| | | TTTTTTTTcagccaactccaaTTTTTTTT- |
| | | GCTCAGTCGCGAATGAGCTTTGG |
| SST | 1922 | -GGCATGTGTATGGT-GTTTTAGAGCTA- |
| | | CCAAAGCTCATTCGCGACTGAGC- |
| | | TTTTTTTTcagccaactccaaTTTTTTTT- |
| | | GCTCAGTCGCGAATGAGCTTTGG |
| SST | 1923 | -GACAAGATCTAAAG-GTTTTAGAGCTA- |
| | | CCAAAGCTCATTCGCGACTGAGC- |
| | | TTTTTTTTcagccaactccaaTTTTTTTT- |
| | | GCTCAGTCGCGAATGAGCTTTGG |
| SST | 1924 | g-TTGTATAAATCGTG-GTTTTAGAGCTA- |
| | | CCAAAGCTCATTCGCGACTGAGC- |
| | | TTTTTTTTcagccaactccaaTTTTTTTT- |
| | | GCTCAGTCGCGAATGAGCTTTGG |
| SST | 1925 | -GTGCGTAAAAGGGC-GTTTTAGAGCTA- |
| | | CCATGGCACGATCGACACGGAGG- |
| | | TTTTTTTTcagccaactccaaTTTTTTTT- |
| | | CCTCCGTGTCGATCGTGCCATGG |
| SST | 1926 | -GGCATGTGTATGGT-GTTTTAGAGCTA- |
| | | CCATGGCACGATCGACACGGAGG- |
| | | TTTTTTTTcagccaactccaaTTTTTTTT- |
| | | CCTCCGTGTCGATCGTGCCATGG |
| SST | 1927 | -GACAAGATCTAAAG-GTTTTAGAGCTA- |
| | | CCATGGCACGATCGACACGGAGG- |
| | | TTTTTTTTcagccaactccaaTTTTTTTT- |
| | | CCTCCGTGTCGATCGTGCCATGG |
| SST | 1928 | g-TTGTATAAATCGTG-GTTTTAGAGCTA- |
| | | CCATGGCACGATCGACACGGAGG- |
| | | TTTTTTTTcagccaactccaaTTTTTTTT- |
| | | CCTCCGTGTCGATCGTGCCATGG |
| SST | 1929 | -GTGCGTAAAAGGGC-GTTTTAGAGCTA- |
| | | CCCGAACTCTCTATCGAACGAGT- |
| | | TTTTTTTTcagccaactccaaTTTTTTTT- |
| | | ACTCGTTCGATAGAGAGTTCGGG |
| SST | 1930 | -GGCATGTGTATGGT-GTTTTAGAGCTA- |
| | | CCCGAACTCTCTATCGAACGAGT- |
| | | TTTTTTTTcagccaactccaaTTTTTTTT- |
| | | ACTCGTTCGATAGAGAGTTCGGG |
| SST | 1931 | -GACAAGATCTAAAG-GTTTTAGAGCTA- |
| | | CCCGAACTCTCTATCGAACGAGT- |
| | | TTTTTTTTcagccaactccaaTTTTTTTT- |
| | | ACTCGTTCGATAGAGAGTTCGGG |
| SST | 1932 | g-TTGTATAAATCGTG-GTTTTAGAGCTA- |
| | | CCCGAACTCTCTATCGAACGAGT- |
| | | TTTTTTTTcagccaactccaaTTTTTTTT- |
| | | ACTCGTTCGATAGAGAGTTCGGG |
| TBXT | 1933 | -GCTTTCACGGAAGG-GTTTTAGAGCTA- |
| | | CCGTCGTTGTACCGTCTACTTGAC- |
| | | TTTTTTTTcagccaactccaaTTTTTTTT- |
| | | GTCAAGTAGACGGTACAACGACGG |
| TBXT | 1934 | g-CTGCGCATCGGGTG-GTTTTAGAGCTA- |
| | | CCGTCGTTGTACCGTCTACTTGAC- |
| | | TTTTTTTTcagccaactccaaTTTTTTTT- |
| | | GTCAAGTAGACGGTACAACGACGG |
| TBXT | 1935 | g-CCGCACTTCCGCGA-GTTTTAGAGCTA- |
| | | CCGTCGTTGTACCGTCTACTTGAC- |
| | | TTTTTTTTcagccaactccaaTTTTTTTT- |
| | | GTCAAGTAGACGGTACAACGACGG |
| TBXT | 1936 | -GCGCCAAGCGGTGT-GTTTTAGAGCTA- |
| | | CCGTCGTTGTACCGTCTACTTGAC- |
| | | TTTTTTTTcagccaactccaaTTTTTTTT- |
| | | GTCAAGTAGACGGTACAACGACGG |
| TBXT | 1937 | -GCTTTCACGGAAGG-GTTTTAGAGCTA- |
| | | CCTACACTCGACATCGGTAGCTA- |
| | | TTTTTTTTcagccaactccaaTTTTTTTT- |
| | | TAGCTACCGATGTCGAGTGTAGG |
| TBXT | 1938 | g-CTGCGCATCGGGTG-GTTTTAGAGCTA- |
| | | CCTACACTCGACATCGGTAGCTA- |
| | | TTTTTTTTcagccaactccaaTTTTTTTT- |
| | | TAGCTACCGATGTCGAGTGTAGG |
| TBXT | 1939 | g-CCGCACTTCCGCGA-GTTTTAGAGCTA- |
| | | CCTACACTCGACATCGGTAGCTA- |
| | | TTTTTTTTcagccaactccaaTTTTTTTT- |
| | | TAGCTACCGATGTCGAGTGTAGG |
| TBXT | 1940 | -GCGCCAAGCGGTGT-GTTTTAGAGCTA- |
| | | CCTACACTCGACATCGGTAGCTA- |
| | | TTTTTTTTcagccaactccaaTTTTTTTT- |
| | | TAGCTACCGATGTCGAGTGTAGG |
| TBXT | 1941 | -GCTTTCACGGAAGG-GTTTTAGAGCTA- |
| | | CCCTGGCGGAACGTTCGAGTAAT- |
| | | TTTTTTTTcagccaactccaaTTTTTTTT- |
| | | ATTACTCGAACGTTCCGCCAGGG |
| TBXT | 1942 | g-CTGCGCATCGGGTG-GTTTTAGAGCTA- |
| | | CCCTGGCGGAACGTTCGAGTAAT- |
| | | TTTTTTTTcagccaactccaaTTTTTTTT- |
| | | ATTACTCGAACGTTCCGCCAGGG |
| TBXT | 1943 | g-CCGCACTTCCGCGA-GTTTTAGAGCTA- |
| | | CCCTGGCGGAACGTTCGAGTAAT- |
| | | TTTTTTTTcagccaactccaaTTTTTTTT- |
| | | ATTACTCGAACGTTCCGCCAGGG |
| TBXT | 1944 | -GCGCCAAGCGGTGT-GTTTTAGAGCTA- |
| | | CCCTGGCGGAACGTTCGAGTAAT- |
| | | TTTTTTTTcagccaactccaaTTTTTTTT- |
| | | ATTACTCGAACGTTCCGCCAGGG |
| TBXT | 1945 | -GCTTTCACGGAAGG-GTTTTAGAGCTA- |
| | | CCTACACGATAGTGGTCGTGCGC- |
| | | TTTTTTTTcagccaactccaaTTTTTTTT- |
| | | GCGCACGACCACTATCGTGTAGG |
| TBXT | 1946 | g-CTGCGCATCGGGTG-GTTTTAGAGCTA- |
| | | CCTACACGATAGTGGTCGTGCGC- |
| | | TTTTTTTTcagccaactccaaTTTTTTTT- |
| | | GCGCACGACCACTATCGTGTAGG |
| TBXT | 1947 | g-CCGCACTTCCGCGA-GTTTTAGAGCTA- |
| | | CCTACACGATAGTGGTCGTGCGC- |
| | | TTTTTTTTcagccaactccaaTTTTTTTT- |
| | | GCGCACGACCACTATCGTGTAGG |
| TBXT | 1948 | -GCGCCAAGCGGTGT-GTTTTAGAGCTA- |
| | | CCTACACGATAGTGGTCGTGCGC- |
| | | TTTTTTTTcagccaactccaaTTTTTTTT- |
| | | GCGCACGACCACTATCGTGTAGG |
| TBXT | 1949 | -GCTTTCACGGAAGG-GTTTTAGAGCTA- |
| | | CCTTCCCGACTTCCGTAGGAGCGC- |
| | | TTTTTTTTcagccaactccaaTTTTTTTT- |
| | | GCGCTCCTACGGAAGTCGGGAAGG |
| TBXT | 1950 | g-CTGCGCATCGGGTG-GTTTTAGAGCTA- |
| | | CCTTCCCGACTTCCGTAGGAGCGC- |
| | | TTTTTTTTcagccaactccaaTTTTTTTT- |
| | | GCGCTCCTACGGAAGTCGGGAAGG |
| TBXT | 1951 | g-CCGCACTTCCGCGA-GTTTTAGAGCTA- |
| | | CCTTCCCGACTTCCGTAGGAGCGC- |
| | | TTTTTTTTcagccaactccaaTTTTTTTT- |
| | | GCGCTCCTACGGAAGTCGGGAAGG |
| TBXT | 1952 | -GCGCCAAGCGGTGT-GTTTTAGAGCTA- |
| | | CCTTCCCGACTTCCGTAGGAGCGC- |
| | | TTTTTTTTcagccaactccaaTTTTTTTT- |
| | | GCGCTCCTACGGAAGTCGGGAAGG |
| TBXT | 1953 | -GCTTTCACGGAAGG-GTTTTAGAGCTA- |
| | | CCTGAAGGTAAAGATCGGGTCCTC- |
| | | TTTTTTTTcagccaactccaaTTTTTTTT- |
| | | GAGGACCCGATCTTTACCTTCAGG |
| TBXT | 1954 | g-CTGCGCATCGGGTG-GTTTTAGAGCTA- |
| | | CCTGAAGGTAAAGATCGGGTCCTC- |
| | | TTTTTTTTcagccaactccaaTTTTTTTT- |
| | | GAGGACCCGATCTTTACCTTCAGG |
| TBXT | 1955 | g-CCGCACTTCCGCGA-GTTTTAGAGCTA- |
| | | CCTGAAGGTAAAGATCGGGTCCTC- |
| | | TTTTTTTTcagccaactccaaTTTTTTTT- |
| | | GAGGACCCGATCTTTACCTTCAGG |
| TBXT | 1956 | -GCGCCAAGCGGTGT-GTTTTAGAGCTA- |
| | | CCTGAAGGTAAAGATCGGGTCCTC- |
| | | TTTTTTTTcagccaactccaaTTTTTTTT- |
| | | GAGGACCCGATCTTTACCTTCAGG |
| TBXT | 1957 | -GCTTTCACGGAAGG-GTTTTAGAGCTA- |
| | | CCTGGTTATAGCGGACGCACTGT- |
| | | TTTTTTTTcagccaactccaaTTTTTTTT- |
| | | ACAGTGCGTCCGCTATAACCAGG |
| TBXT | 1958 | g-CTGCGCATCGGGTG-GTTTTAGAGCTA- |
| | | CCTGGTTATAGCGGACGCACTGT- |
| | | TTTTTTTTcagccaactccaaTTTTTTTT- |
| | | ACAGTGCGTCCGCTATAACCAGG |
| TBXT | 1959 | g-CCGCACTTCCGCGA-GTTTTAGAGCTA- |
| | | CCTGGTTATAGCGGACGCACTGT- |
| | | TTTTTTTTcagccaactccaaTTTTTTTT- |
| | | ACAGTGCGTCCGCTATAACCAGG |
| TBXT | 1960 | -GCGCCAAGCGGTGT-GTTTTAGAGCTA- |
| | | CCTGGTTATAGCGGACGCACTGT- |
| | | TTTTTTTTcagccaactccaaTTTTTTTT- |
| | | ACAGTGCGTCCGCTATAACCAGG |
| TBXT | 1961 | -GCTTTCACGGAAGG-GTTTTAGAGCTA- |
| | | CCGCATCGTATTATCTGCGAAGC- |
| | | TTTTTTTTcagccaactccaaTTTTTTTT- |
| | | GCTTCGCAGATAATACGATGCGG |
| TBXT | 1962 | g-CTGCGCATCGGGTG-GTTTTAGAGCTA- |
| | | CCGCATCGTATTATCTGCGAAGC- |
| | | TTTTTTTTcagccaactccaaTTTTTTTT- |
| | | GCTTCGCAGATAATACGATGCGG |
| TBXT | 1963 | g-CCGCACTTCCGCGA-GTTTTAGAGCTA- |
| | | CCGCATCGTATTATCTGCGAAGC- |
| | | TTTTTTTTcagccaactccaaTTTTTTTT- |
| | | GCTTCGCAGATAATACGATGCGG |
| TBXT | 1964 | -GCGCCAAGCGGTGT-GTTTTAGAGCTA- |
| | | CCGCATCGTATTATCTGCGAAGC- |
| | | TTTTTTTTcagccaactccaaTTTTTTTT- |
| | | GCTTCGCAGATAATACGATGCGG |
| TBXT | 1965 | -GCTTTCACGGAAGG-GTTTTAGAGCTA- |
| | | CCGCTAGGACGTTCAACGGAGTC- |
| | | TTTTTTTTcagccaactccaaTTTTTTTT- |
| | | GACTCCGTTGAACGTCCTAGCGG |
| TBXT | 1966 | g-CTGCGCATCGGGTG-GTTTTAGAGCTA- |
| | | CCGCTAGGACGTTCAACGGAGTC- |
| | | TTTTTTTTcagccaactccaaTTTTTTTT- |
| | | GACTCCGTTGAACGTCCTAGCGG |
| TBXT | 1967 | g-CCGCACTTCCGCGA-GTTTTAGAGCTA- |
| | | CCGCTAGGACGTTCAACGGAGTC- |
| | | TTTTTTTTcagccaactccaaTTTTTTTT- |
| | | GACTCCGTTGAACGTCCTAGCGG |
| TBXT | 1968 | -GCGCCAAGCGGTGT-GTTTTAGAGCTA- |
| | | CCGCTAGGACGTTCAACGGAGTC- |
| | | TTTTTTTTcagccaactccaaTTTTTTTT- |
| | | GACTCCGTTGAACGTCCTAGCGG |
| TBXT | 1969 | -GCTTTCACGGAAGG-GTTTTAGAGCTA- |
| | | CCATAGCGGTACTATCGGCATCT- |
| | | TTTTTTTTcagccaactccaaTTTTTTTT- |
| | | AGATGCCGATAGTACCGCTATGG |
| TBXT | 1970 | g-CTGCGCATCGGGTG-GTTTTAGAGCTA- |
| | | CCATAGCGGTACTATCGGCATCT- |
| | | TTTTTTTTcagccaactccaaTTTTTTTT- |
| | | AGATGCCGATAGTACCGCTATGG |
| TBXT | 1971 | g-CCGCACTTCCGCGA-GTTTTAGAGCTA- |
| | | CCATAGCGGTACTATCGGCATCT- |
| | | TTTTTTTTcagccaactccaaTTTTTTTT- |
| | | AGATGCCGATAGTACCGCTATGG |
| TBXT | 1972 | -GCGCCAAGCGGTGT-GTTTTAGAGCTA- |
| | | CCATAGCGGTACTATCGGCATCT- |
| | | TTTTTTTTcagccaactccaaTTTTTTTT- |
| | | AGATGCCGATAGTACCGCTATGG |
| TBXT | 1973 | -GCTTTCACGGAAGG-GTTTTAGAGCTA- |
| | | CCTCGTACTAGTCTCGCATGACC- |
| | | TTTTTTTTcagccaactccaaTTTTTTTT- |
| | | GGTCATGCGAGACTAGTACGAGG |
| TBXT | 1974 | g-CTGCGCATCGGGTG-GTTTTAGAGCTA- |
| | | CCTCGTACTAGTCTCGCATGACC- |
| | | TTTTTTTTcagccaactccaaTTTTTTTT- |
| | | GGTCATGCGAGACTAGTACGAGG |
| TBXT | 1975 | g-CCGCACTTCCGCGA-GTTTTAGAGCTA- |
| | | CCTCGTACTAGTCTCGCATGACC- |
| | | TTTTTTTTcagccaactccaaTTTTTTTT- |
| | | GGTCATGCGAGACTAGTACGAGG |
| TBXT | 1976 | -GCGCCAAGCGGTGT-GTTTTAGAGCTA- |
| | | CCTCGTACTAGTCTCGCATGACC- |
| | | TTTTTTTTcagccaactccaaTTTTTTTT- |
| | | GGTCATGCGAGACTAGTACGAGG |
| TBXT | 1977 | -GCTTTCACGGAAGG-GTTTTAGAGCTA- |
| | | CCGATAGTGCTAAACGACGCTTT- |
| | | TTTTTTTTcagccaactccaaTTTTTTTT- |
| | | AAAGCGTCGTTTAGCACTATCGG |
| TBXT | 1978 | g-CTGCGCATCGGGTG-GTTTTAGAGCTA- |
| | | CCGATAGTGCTAAACGACGCTTT- |
| | | TTTTTTTTcagccaactccaaTTTTTTTT- |
| | | AAAGCGTCGTTTAGCACTATCGG |
| TBXT | 1979 | g-CCGCACTTCCGCGA-GTTTTAGAGCTA- |
| | | CCGATAGTGCTAAACGACGCTTT- |
| | | TTTTTTTTcagccaactccaaTTTTTTTT- |
| | | AAAGCGTCGTTTAGCACTATCGG |
| TBXT | 1980 | -GCGCCAAGCGGTGT-GTTTTAGAGCTA- |
| | | CCGATAGTGCTAAACGACGCTTT- |
| | | TTTTTTTTcagccaactccaaTTTTTTTT- |
| | | AAAGCGTCGTTTAGCACTATCGG |
| TBXT | 1981 | -GCTTTCACGGAAGG-GTTTTAGAGCTA- |
| | | CCCGTTATCGACGTTCAAGGAAC- |
| | | TTTTTTTTcagccaactccaaTTTTTTTT- |
| | | GTTCCTTGAACGTCGATAACGGG |
| TBXT | 1982 | g-CTGCGCATCGGGTG-GTTTTAGAGCTA- |
| | | CCCGTTATCGACGTTCAAGGAAC- |
| | | TTTTTTTTcagccaactccaaTTTTTTTT- |
| | | GTTCCTTGAACGTCGATAACGGG |
| TBXT | 1983 | g-CCGCACTTCCGCGA-GTTTTAGAGCTA- |
| | | CCCGTTATCGACGTTCAAGGAAC- |
| | | TTTTTTTTcagccaactccaaTTTTTTTT- |
| | | GTTCCTTGAACGTCGATAACGGG |
| TBXT | 1984 | -GCGCCAAGCGGTGT-GTTTTAGAGCTA- |
| | | CCCGTTATCGACGTTCAAGGAAC- |
| | | TTTTTTTTcagccaactccaaTTTTTTTT- |
| | | GTTCCTTGAACGTCGATAACGGG |
| TBXT | 1985 | -GCTTTCACGGAAGG-GTTTTAGAGCTA- |
| | | CCGATCAATGCGGTCTGCGTAAC- |
| | | TTTTTTTTcagccaactccaaTTTTTTTT- |
| | | GTTACGCAGACCGCATTGATCGG |
| TBXT | 1986 | g-CTGCGCATCGGGTG-GTTTTAGAGCTA- |
| | | CCGATCAATGCGGTCTGCGTAAC- |
| | | TTTTTTTTcagccaactccaaTTTTTTTT- |
| | | GTTACGCAGACCGCATTGATCGG |
| TBXT | 1987 | g-CCGCACTTCCGCGA-GTTTTAGAGCTA- |
| | | CCGATCAATGCGGTCTGCGTAAC- |
| | | TTTTTTTTcagccaactccaaTTTTTTTT- |
| | | GTTACGCAGACCGCATTGATCGG |
| TBXT | 1988 | -GCGCCAAGCGGTGT-GTTTTAGAGCTA- |
| | | CCGATCAATGCGGTCTGCGTAAC- |
| | | TTTTTTTTcagccaactccaaTTTTTTTT- |
| | | GTTACGCAGACCGCATTGATCGG |
| TBXT | 1989 | -GCTTTCACGGAAGG-GTTTTAGAGCTA- |
| | | CCCTTACTCGCGATACTCTCGAC- |
| | | TTTTTTTTcagccaactccaaTTTTTTTT- |
| | | GTCGAGAGTATCGCGAGTAAGGG |
| TBXT | 1990 | g-CTGCGCATCGGGTG-GTTTTAGAGCTA- |
| | | CCCTTACTCGCGATACTCTCGAC- |
| | | TTTTTTTTcagccaactccaaTTTTTTTT- |
| | | GTCGAGAGTATCGCGAGTAAGGG |
| TBXT | 1991 | g-CCGCACTTCCGCGA-GTTTTAGAGCTA- |
| | | CCCTTACTCGCGATACTCTCGAC- |
| | | TTTTTTTTcagccaactccaaTTTTTTTT- |
| | | GTCGAGAGTATCGCGAGTAAGGG |
| TBXT | 1992 | -GCGCCAAGCGGTGT-GTTTTAGAGCTA- |
| | | CCCTTACTCGCGATACTCTCGAC- |
| | | TTTTTTTTcagccaactccaaTTTTTTTT- |
| | | GTCGAGAGTATCGCGAGTAAGGG |
| TBXT | 1993 | -GCTTTCACGGAAGG-GTTTTAGAGCTA- |
| | | CCGCGGACGGTAAGCACGGAATA- |
| | | TTTTTTTTcagccaactccaaTTTTTTTT- |
| | | TATTCCGTGCTTACCGTCCGCGG |
| TBXT | 1994 | g-CTGCGCATCGGGTG-GTTTTAGAGCTA- |
| | | CCGCGGACGGTAAGCACGGAATA- |
| | | TTTTTTTTcagccaactccaaTTTTTTTT- |
| | | TATTCCGTGCTTACCGTCCGCGG |
| TBXT | 1995 | g-CCGCACTTCCGCGA-GTTTTAGAGCTA- |
| | | CCGCGGACGGTAAGCACGGAATA- |
| | | TTTTTTTTcagccaactccaaTTTTTTTT- |
| | | TATTCCGTGCTTACCGTCCGCGG |
| TBXT | 1996 | -GCGCCAAGCGGTGT-GTTTTAGAGCTA- |
| | | CCGCGGACGGTAAGCACGGAATA- |
| | | TTTTTTTTcagccaactccaaTTTTTTTT- |
| | | TATTCCGTGCTTACCGTCCGCGG |
| TBXT | 1997 | -GCTTTCACGGAAGG-GTTTTAGAGCTA- |
| | | CCTATAGTCACGAATCGTAGGGT- |
| | | TTTTTTTTcagccaactccaaTTTTTTTT- |
| | | ACCCTACGATTCGTGACTATAGG |
| TBXT | 1998 | g-CTGCGCATCGGGTG-GTTTTAGAGCTA- |
| | | CCTATAGTCACGAATCGTAGGGT- |
| | | TTTTTTTTcagccaactccaaTTTTTTTT- |
| | | ACCCTACGATTCGTGACTATAGG |
| TBXT | 1999 | g-CCGCACTTCCGCGA-GTTTTAGAGCTA- |
| | | CCTATAGTCACGAATCGTAGGGT- |
| | | TTTTTTTTcagccaactccaaTTTTTTTT- |
| | | ACCCTACGATTCGTGACTATAGG |
| TBXT | 2000 | -GCGCCAAGCGGTGT-GTTTTAGAGCTA- |
| | | CCTATAGTCACGAATCGTAGGGT- |
| | | TTTTTTTTcagccaactccaaTTTTTTTT- |
| | | ACCCTACGATTCGTGACTATAGG |
| TBXT | 2001 | -GCTTTCACGGAAGG-GTTTTAGAGCTA- |
| | | CCCGTCGTCACGTATGCGTAGCA- |
| | | TTTTTTTTcagccaactccaaTTTTTTTT- |
| | | TGCTACGCATACGTGACGACGGG |
| TBXT | 2002 | g-CTGCGCATCGGGTG-GTTTTAGAGCTA- |
| | | CCCGTCGTCACGTATGCGTAGCA- |
| | | TTTTTTTTcagccaactccaaTTTTTTTT- |
| | | TGCTACGCATACGTGACGACGGG |
| TBXT | 2003 | g-CCGCACTTCCGCGA-GTTTTAGAGCTA- |
| | | CCCGTCGTCACGTATGCGTAGCA- |
| | | TTTTTTTTcagccaactccaaTTTTTTTT- |
| | | TGCTACGCATACGTGACGACGGG |
| TBXT | 2004 | -GCGCCAAGCGGTGT-GTTTTAGAGCTA- |
| | | CCCGTCGTCACGTATGCGTAGCA- |
| | | TTTTTTTTcagccaactccaaTTTTTTTT- |
| | | TGCTACGCATACGTGACGACGGG |
| TBXT | 2005 | -GCTTTCACGGAAGG-GTTTTAGAGCTA- |
| | | CCCGAGAGGTAGTAGACGACGCA- |
| | | TTTTTTTTcagccaactccaaTTTTTTTT- |
| | | TGCGTCGTCTACTACCTCTCGGG |
| TBXT | 2006 | g-CTGCGCATCGGGTG-GTTTTAGAGCTA- |
| | | CCCGAGAGGTAGTAGACGACGCA- |
| | | TTTTTTTTcagccaactccaaTTTTTTTT- |
| | | TGCGTCGTCTACTACCTCTCGGG |
| TBXT | 2007 | g-CCGCACTTCCGCGA-GTTTTAGAGCTA- |
| | | CCCGAGAGGTAGTAGACGACGCA- |
| | | TTTTTTTTcagccaactccaaTTTTTTTT- |
| | | TGCGTCGTCTACTACCTCTCGGG |
| TBXT | 2008 | -GCGCCAAGCGGTGT-GTTTTAGAGCTA- |
| | | CCCGAGAGGTAGTAGACGACGCA- |
| | | TTTTTTTTcagccaactccaaTTTTTTTT- |
| | | TGCGTCGTCTACTACCTCTCGGG |
| TBXT | 2009 | -GCTTTCACGGAAGG-GTTTTAGAGCTA- |
| | | CCGACGTCTACGGACGGGAGCTA- |
| | | TTTTTTTTcagccaactccaaTTTTTTTT- |
| | | TAGCTCCCGTCCGTAGACGTCGG |
| TBXT | 2010 | g-CTGCGCATCGGGTG-GTTTTAGAGCTA- |
| | | CCGACGTCTACGGACGGGAGCTA- |
| | | TTTTTTTTcagccaactccaaTTTTTTTT- |
| | | TAGCTCCCGTCCGTAGACGTCGG |
| TBXT | 2011 | g-CCGCACTTCCGCGA-GTTTTAGAGCTA- |
| | | CCGACGTCTACGGACGGGAGCTA- |
| | | TTTTTTTTcagccaactccaaTTTTTTTT- |
| | | TAGCTCCCGTCCGTAGACGTCGG |
| TBXT | 2012 | -GCGCCAAGCGGTGT-GTTTTAGAGCTA- |
| | | CCGACGTCTACGGACGGGAGCTA- |
| | | TTTTTTTTcagccaactccaaTTTTTTTT- |
| | | TAGCTCCCGTCCGTAGACGTCGG |
| TBXT | 2013 | -GCTTTCACGGAAGG-GTTTTAGAGCTA- |
| | | CCAAAGCTCATTCGCGACTGAGC- |
| | | TTTTTTTTcagccaactccaaTTTTTTTT- |
| | | GCTCAGTCGCGAATGAGCTTTGG |
| TBXT | 2014 | g-CTGCGCATCGGGTG-GTTTTAGAGCTA- |
| | | CCAAAGCTCATTCGCGACTGAGC- |
| | | TTTTTTTTcagccaactccaaTTTTTTTT- |
| | | GCTCAGTCGCGAATGAGCTTTGG |
| TBXT | 2015 | g-CCGCACTTCCGCGA-GTTTTAGAGCTA- |
| | | CCAAAGCTCATTCGCGACTGAGC- |
| | | TTTTTTTTcagccaactccaaTTTTTTTT- |
| | | GCTCAGTCGCGAATGAGCTTTGG |
| TBXT | 2016 | -GCGCCAAGCGGTGT-GTTTTAGAGCTA- |
| | | CCAAAGCTCATTCGCGACTGAGC- |
| | | TTTTTTTTcagccaactccaaTTTTTTTT- |
| | | GCTCAGTCGCGAATGAGCTTTGG |
| TBXT | 2017 | -GCTTTCACGGAAGG-GTTTTAGAGCTA- |
| | | CCATGGCACGATCGACACGGAGG- |
| | | TTTTTTTTcagccaactccaaTTTTTTTT- |
| | | CCTCCGTGTCGATCGTGCCATGG |
| TBXT | 2018 | g-CTGCGCATCGGGTG-GTTTTAGAGCTA- |
| | | CCATGGCACGATCGACACGGAGG- |
| | | TTTTTTTTcagccaactccaaTTTTTTTT- |
| | | CCTCCGTGTCGATCGTGCCATGG |
| TBXT | 2019 | g-CCGCACTTCCGCGA-GTTTTAGAGCTA- |
| | | CCATGGCACGATCGACACGGAGG- |
| | | TTTTTTTTcagccaactccaaTTTTTTTT- |
| | | CCTCCGTGTCGATCGTGCCATGG |
| TBXT | 2020 | -GCGCCAAGCGGTGT-GTTTTAGAGCTA- |
| | | CCATGGCACGATCGACACGGAGG- |
| | | TTTTTTTTcagccaactccaaTTTTTTTT- |
| | | CCTCCGTGTCGATCGTGCCATGG |
| TBXT | 2021 | -GCTTTCACGGAAGG-GTTTTAGAGCTA- |
| | | CCCGAACTCTCTATCGAACGAGT- |
| | | TTTTTTTTcagccaactccaaTTTTTTTT- |
| | | ACTCGTTCGATAGAGAGTTCGGG |
| TBXT | 2022 | g-CTGCGCATCGGGTG-GTTTTAGAGCTA- |
| | | CCCGAACTCTCTATCGAACGAGT- |
| | | TTTTTTTTcagccaactccaaTTTTTTTT- |
| | | ACTCGTTCGATAGAGAGTTCGGG |
| TBXT | 2023 | g-CCGCACTTCCGCGA-GTTTTAGAGCTA- |
| | | CCCGAACTCTCTATCGAACGAGT- |
| | | TTTTTTTTcagccaactccaaTTTTTTTT- |
| | | ACTCGTTCGATAGAGAGTTCGGG |
| TBXT | 2024 | -GCGCCAAGCGGTGT-GTTTTAGAGCTA- |
| | | CCCGAACTCTCTATCGAACGAGT- |
| | | TTTTTTTTcagccaactccaaTTTTTTTT- |
| | | ACTCGTTCGATAGAGAGTTCGGG |

TABLE 5
Sequences of Spacer and target gene

| | SEQ ID | |
|---|---|---|
| Gene target | NO: | spacer |
| EGF | 2030 | GAACTGCTAAATAT |
| EGF | 2031 | CAATTCCTCCACAC |
| EGF | 2032 | TCAAGTGTCACTAA |
| EGF | 2033 | ACCATAAATATCCT |
| FEV | 2034 | CGAGCCGTACCAGA |
| FEV | 2035 | CCAAGGCTTAAGGG |
| FEV | 2036 | GCCGACTGGAAGAA |
| FEV | 2037 | CTGCAAACAGTGAT |
| FOXA2 | 2038 | CGGTAGTTGGAAGT |
| FOXA2 | 2039 | CAGCGCCCCGCGGT |
| FOXA2 | 2040 | CGCAGTGACGTGGG |
| FOXA2 | 2041 | CTGCCCCGGGTCTG |
| GATA4 | 2042 | GATTGGGTTCGCTG |
| GATA4 | 2043 | CCTCCGCTGGGCGC |
| GATA4 | 2044 | GCAACTCGGCCCTA |
| GATA4 | 2045 | GGGATGAGGACCAC |
| gata6 | 2046 | GCGCTGTTTGTTTA |
| gata6 | 2047 | CCGCACCCATCCAG |
| gata6 | 2048 | GCGAGTCCACCCGG |
| gata6 | 2049 | GAGCAGCTGGGCGC |
| GCG | 2050 | AGACCTTAGAGACC |
| GCG | 2051 | GCTACGTAATTTCA |
| GCG | 2052 | TTGAAAGTAGAAGG |
| GCG | 2053 | TTCTTACAAGTCTT |
| INS | 2054 | ATGGGCCAGGCGGC |
| INS | 2055 | ACCCGCTGGTCCTG |
| INS | 2056 | TCGTGAAGCATGTG |
| INS | 2057 | CAGCACCAGGGAAA |
| isl1 | 2058 | CGCCGAGCGGTCAG |
| isl1 | 2059 | GTGCACCACGGCGT |
| isl1 | 2060 | CGATGGAGCTGAGT |
| isl1 | 2061 | AGCGCCGCGCCCAT |
| LMX1A | 2062 | AAGGGGCACTGTAA |
| LMX1A | 2063 | GCAAAGGCCCAGTC |
| LMX1A | 2064 | CACGGCCCCGCCAC |
| LMX1A | 2065 | GAACGCAGCTACTG |
| MAFA | 2066 | ACCCGGCTCTATAA |
| MAFA | 2067 | CTCCGATTGGCCCG |
| MAFA | 2068 | GCAGTGCCCCGTGA |
| MAFA | 2069 | AGGAGATTGACAGC |
| NEUROD1 | 2070 | CGTGCGCAGGCGTC |
| NEUROD1 | 2071 | TAGCATCACTAACT |
| NEUROD1 | 2072 | GCGGAGTCTCTAAC |
| NEUROD1 | 2073 | GACGAGCAAGGCGT |
| NEUROG3 | 2074 | CTCGAGGGCGGGCT |
| NEUROG3 | 2075 | GCCAATCAGCGCCG |
| NEUROG3 | 2076 | TGGATTCCGGACAA |
| NEUROG3 | 2077 | GTGTGGCTCTGGTC |
| NKX2-2 | 2078 | GATCGCTCGGGCAA |
| NKX2-2 | 2079 | GACCCGCCCACACG |
| NKX2-2 | 2080 | AACCTGGGGAGGCG |
| NKX2-2 | 2081 | GTTGGCTGGGAGCG |
| NKX6-1 | 2082 | TACGGTCTCCGGCG |
| NKX6-1 | 2083 | GCCTCCCGCGTGGA |
| NKX6-1 | 2084 | CAGCGGGGGATACG |
| NKX6-1 | 2085 | CCCCCCGTGGCCGG |
| ONECUT1 | 2086 | CGGCTACCGAACCG |
| ONECUT1 | 2087 | CGCCGCGACCTAGG |
| ONECUT1 | 2088 | GCGCTGGATGGCCA |
| ONECUT1 | 2089 | GCCGCTGCAATCCC |
| PDX1 | 2090 | CTGGCCGCACTAAG |
| PDX1 | 2091 | GTGCTCCCCAAAAT |
| PDX1 | 2092 | GCACTGATCTCAGA |
| PDX1 | 2093 | CACGTGGGGCCCCG |
| PTF1a | 2094 | CTGGCACGCGCCTA |
| PTF1a | 2095 | GCGCGGGTACGCAG |
| PTF1a | 2096 | TGCCGGCGGCGAGG |
| PTF1a | 2097 | CAGGAGCTCCCAAA |
| SHH | 2098 | CCCACCTTTATCTT |
| SHH | 2099 | GGGGCGCATCTGAT |
| SHH | 2100 | CAGGGGGAAACGCA |
| SHH | 2101 | GCCTCTGTGGACCG |
| sox17 | 2102 | TTAGGCCCACGCCC |
| sox17 | 2103 | GTAGCCTTGGGCGC |
| sox17 | 2104 | GCGTCCTCTCCCAC |
| sox17 | 2105 | CCCGCAGTGTCACT |
| SOX9 | 2106 | CAAACTTACACACT |
| SOX9 | 2107 | AAAGGGCGGACGGT |
| SOX9 | 2108 | ATTGGACCCGATTT |
| SOX9 | 2109 | GTGGCTCTAAGGTG |
| SST | 2110 | GTGCGTAAAAGGGC |
| SST | 2111 | GGCATGTGTATGGT |
| SST | 2112 | GACAAGATCTAAAG |
| SST | 2113 | TTGTATAAATCGTG |
| TBXT | 2114 | GCTTTCACGGAAGG |
| TBXT | 2115 | CTGCGCATCGGGTG |
| TBXT | 2116 | CCGCACTTCCGCGA |
| TBXT | 2117 | GCGCCAAGCGGTGT |

TABLE 6
Sequences of Stems

| SEQ | | SEQ | |
|---|---|---|---|
| ID | | ID | |
| NO | stem1 | NO | stem2 (reverse complement) |
| 2120 | CCTACACTCGACATCGGTAGCTA | 2143 | TAGCTACCGATGTCGAGTGTAGG |
| 2121 | CCCTGGCGGAACGTTCGAGTAAT | 2144 | ATTACTCGAACGTTCCGCCAGGG |
| 2122 | CCTACACGATAGTGGTCGTGCGC | 2145 | GCGCACGACCACTATCGTGTAGG |
| 2123 | CCCGAACTCTCTATCGAACGAGT | 2146 | ACTCGTTCGATAGAGAGTTCGGG |
| 2124 | CCATGGCACGATCGACACGGAGG | 2147 | CCTCCGTGTCGATCGTGCCATGG |
| 2125 | CCAAAGCTCATTCGCGACTGAGC | 2148 | GCTCAGTCGCGAATGAGCTTTGG |
| 2126 | CCGACGTCTACGGACGGGAGCTA | 2149 | TAGCTCCCGTCCGTAGACGTCGG |
| 2127 | CCCGAGAGGTAGTAGACGACGCA | 2150 | TGCGTCGTCTACTACCTCTCGGG |
| 2128 | CCCGTCGTCACGTATGCGTAGCA | 2151 | TGCTACGCATACGTGACGACGGG |
| 2129 | CCTATAGTCACGAATCGTAGGGT | 2152 | ACCCTACGATTCGTGACTATAGG |
| 2130 | CCGCGGACGGTAAGCACGGAATA | 2153 | TATTCCGTGCTTACCGTCCGCGG |
| 2131 | CCCTTACTCGCGATACTCTCGAC | 2154 | GTCGAGAGTATCGCGAGTAAGGG |
| 2132 | CCGATCAATGCGGTCTGCGTAAC | 2155 | GTTACGCAGACCGCATTGATCGG |
| 2133 | CCCGTTATCGACGTTCAAGGAAC | 2156 | GTTCCTTGAACGTCGATAACGGG |
| 2134 | CCGATAGTGCTAAACGACGCTTT | 2157 | AAAGCGTCGTTTAGCACTATCGG |
| 2135 | CCTCGTACTAGTCTCGCATGACC | 2158 | GGTCATGCGAGACTAGTACGAGG |
| 2136 | CCATAGCGGTACTATCGGCATCT | 2159 | AGATGCCGATAGTACCGCTATGG |
| 2137 | CCGCTAGGACGTTCAACGGAGTC | 2160 | GACTCCGTTGAACGTCCTAGCGG |
| 2138 | CCGCATCGTATTATCTGCGAAGC | 2161 | GCTTCGCAGATAATACGATGCGG |
| 2139 | CCTGGTTATAGCGGACGCACTGT | 2162 | ACAGTGCGTCCGCTATAACCAGG |
| 2140 | CCTGAAGGTAAAGATCGGGTCCTC | 2163 | GAGGACCCGATCTTTACCTTCAGG |
| 2141 | CCTTCCCGACTTCCGTAGGAGCGC | 2164 | GCGCTCCTACGGAAGTCGGGAAGG |
| 2142 | CCGTCGTTGTACCGTCTACTTGAC | 2165 | GTCAAGTAGACGGTACAACGACGG |

### EMBODIMENTS

[0256] The following non-limiting embodiments provide illustrative examples of the invention, but do not limit the scope of the invention.
[0257] 1. A method for conversion of a plurality of stem cells into a plurality of pancreatic lineage cells, the method comprising:
   [0258] contacting the plurality of stem cells with a heterologous genetic circuit comprising a plurality of gate units, wherein the heterologous genetic circuit is activatable to induce the plurality of gate units to modulate expression levels of a plurality of distinct target genes in a sequential manner to effect the conversion, wherein the plurality of gate units comprises:
   [0259] a) a first gate unit that is preconfigured to modulate expression level of a first target gene of the plurality of distinct target genes, wherein the first target gene comprises one or more members selected from the group consisting of a forkhead box (FOX), a SRY-related HMG-box (SOX), and a GATA; and
   [0260] b) a second gate unit that is preconfigured to modulate expression level of a second target gene of the plurality of distinct target genes, such that the expression levels of the first target gene and the second target gene are modulated in the sequential manner,
   [0261] wherein, upon activation of the heterologous genetic circuit, the plurality of gate units operates to effect the conversion.
[0262] 2. The method of Embodiment 1, wherein the first target gene comprises two or more members selected from the group consisting of the FOX, the SOX, and the GATA.
[0263] 3. The method of Embodiment 1, wherein the first target gene comprises the FOX, the SOX, and the GATA.
[0264] 4. The method of Embodiment 1, wherein the first target gene further comprises a T-box transcription factor (TBX).
[0265] 5. The method of Embodiment 1, wherein the second target gene comprises one or more members selected from the group consisting of a basic helix-loop-helix transcription factor (bHLH), a homeobox, and a Maf transcription factor.
[0266] 6. The method of Embodiment 1, the expression level of the first target gene is enhanced by the first gate unit or (ii) the expression level of the second target gene is enhanced by the second gate unit.
[0267] 7. A method for conversion of a plurality of stem cells into a plurality of pancreatic lineage cells, via modulation of expression levels of a plurality of distinct target genes comprising a first target gene and a second target gene, the method comprising:
   [0268] a) contacting a first polynucleotide sequence in the plurality of stem cells by a first heterologous gene regulating moiety to modulate expression level of the first target gene that is operatively coupled to the first polynucleotide sequence, wherein the first target gene comprises one or more members selected from the group consisting of a forkhead box (FOX), a SRY-related HMG-box (SOX), and a GATA; and
   [0269] b) contacting a second polynucleotide sequence in the plurality of stem cells by a second heterologous gene regulating moiety, to modulate expression level of the second target gene that is operatively coupled to the second polynucleotide sequence, wherein the second target gene comprises one or more members selected from the group consisting of a basic helix-loop-helix transcription factor (bHLH), a homeobox, and a Maf transcription factor.
[0270] 8. The method of Embodiment 7, wherein (b) is performed subsequent to (a), to effect modulation of the first target gene and the second target gene, respectively, in a sequential manner.
[0271] 9. The method of Embodiment 7, wherein the first target gene comprises two or more members selected from the group consisting of the FOX, the SOX, and the GATA.
[0272] 10. The method of Embodiment 7, wherein the first target gene comprises the FOX, the SOX, and the GATA.
[0273] 11. The method of Embodiment 7, wherein the second target gene comprises two or more members selected from the group consisting of the bHLH, the homeobox, and the Maf transcription factor.
[0274] 12. The method of Embodiment 7, wherein the second target gene comprises the bHLH, the homeobox, and the Maf transcription factor.
[0275] 13. The method of Embodiment 7, wherein (i) the first polynucleotide sequence is upstream to or encodes the first target gene or (ii) the second polynucleotide sequence is upstream to or encodes the second target gene.
[0276] 14. The method of Embodiment 7, wherein (i) the expression level of the first target gene is enhanced upon the contacting by the first heterologous gene regulating moiety or (ii) the expression level of the second target gene is enhanced upon the contacting by the second heterologous gene regulating moiety.
[0277] 15. The method of Embodiment 7, the method comprises contacting the plurality of stem cells with a heterologous genetic circuit comprising a plurality of gate units, wherein the heterologous genetic circuit is activatable to induce the plurality of gate units to modulate expression levels of the plurality of distinct target genes in a sequential manner to effect the conversion, and wherein the plurality of gate units comprises:
   [0278] (i) a first gate unit that is preconfigured to effect the first heterologous gene regulating moiety to modulate the expression level of the first target gene; and
   [0279] (ii) a second gate unit that is preconfigured to effect the second heterologous gene regulating moiety to modulate the expression level of the second target gene, wherein, upon activation of the heterologous genetic circuit, the plurality of gate units operates to effect the conversion.
[0280] 16. The method of Embodiment 15, wherein (i) the first gate unit is activatable to express the first heterologous gene regulating moiety or (ii) the second gate unit is activatable to express the second heterologous gene regulating moiety.
[0281] 17. A method for conversion of a plurality of stem cells into a plurality of pancreatic lineage cells, via modulation of expression levels of a plurality of distinct target genes comprising a first target gene and a second target gene, the method comprising:
   [0282] a) contacting a first polynucleotide sequence in the plurality of stem cells by a first heterologous gene regulating moiety to modulate expression level of the first target gene that is operatively coupled to the first polynucleotide sequence, wherein the first target gene comprises one or more members selected from the group consisting of a forkhead box (FOX), a SRY-related HMG-box (SOX), a GATA, a basic helix-loop-helix transcription factor (bHLH), a homeobox, and a Maf transcription factor; and
   [0283] b) contacting a second polynucleotide sequence in the plurality of stem cells by a second heterologous gene regulating moiety, to reduce expression level of the second target gene that is operatively coupled to the second polynucleotide sequence, wherein the second target gene comprises one or more members selected from the group consisting of an additional SOX, an additional homeobox, and a ETS transcription factor.
[0284] 18. The method of Embodiment 17, wherein (b) is performed prior to (a), to effect modulation of the first target gene and reduced expression level of the second target gene, respectively, in a sequential manner.
[0285] 19. The method of Embodiment 17, wherein (b) is performed subsequent to (a), to effect reduced expression of the second target gene and modulation of the first target gene, respectively, in a sequential manner.
[0286] 20. The method of Embodiment 17, wherein (a) and (b) are performed simultaneously.
[0287] 21. The method of Embodiment 17, wherein the additional SOX is not a member from SOX9 and SOX17.
[0288] 22. The method of Embodiment 17, wherein the additional SOX comprises SOX2.
[0289] 23. The method of Embodiment 17, wherein the additional homeobox is not a member from PDX1, NKX6-1, NKX2-2, PAX6, ONECUT1, and ISL1.
[0290] 24. The method of Embodiment 17, wherein the additional homeobox comprises CDX1, CDX2, or CDX4.
[0291] 25. The method of Embodiment 24, wherein the additional homeobox comprises CDX2.
[0292] 26. The method of Embodiment 17, wherein the additional homeobox comprises LMX1A or LMX1B.
[0293] 27. The method of Embodiment 26, wherein the additional homeobox comprises LMX1A.
[0294] 28. The method of Embodiment 17, wherein the ETS transcription factor comprises ERG, FLI1, or FEV.
[0295] 29. The method of Embodiment 28, wherein the ETS transcription factor comprises FEV.
[0296] 30. The method of Embodiment 17, the first target gene comprises two or more members selected from the group consisting of the FOX, the SOX, the GATA, the bHLH, the homeobox, and the Maf transcription factor.
[0297] 31. The method of Embodiment 17, the first target gene comprises one or more members selected from the group consisting of the FOX, the SOX, and the GATA.
[0298] 32. The method of Embodiment 17, wherein the first target gene comprises one or more members selected from the group consisting of the bHLH, the homeobox, and the Maf transcription factor.
[0299] 33. The method of Embodiment 17, wherein (i) the first polynucleotide sequence is upstream to or encodes the first target gene or (ii) the second polynucleotide sequence is upstream to or encodes the second target gene.
[0300] 34. The method of Embodiment 17, wherein the expression level of the first target gene is enhanced upon the contacting by the first heterologous gene regulating moiety.
[0301] 35. The method of Embodiment 17, wherein the method comprises contacting the plurality of stem cells with a heterologous genetic circuit comprising a plurality of gate units, wherein the heterologous genetic circuit is activatable to induce the plurality of gate units to modulate expression levels of the plurality of distinct target genes in a sequential manner to effect the conversion, and wherein the plurality of gate units comprises:
   [0302] (i) a first gate unit that is preconfigured to effect the first heterologous gene regulating moiety to modulate the expression level of the first target gene; and
   [0303] (ii) a second gate unit that is preconfigured to effect the second heterologous gene regulating moiety to reduce the expression level of the second target gene wherein, upon activation of the heterologous genetic circuit, the plurality of gate units operates to effect the conversion.
[0304] 36. The method of Embodiment 35, wherein (i) the first gate unit is activatable to express the first heterologous gene regulating moiety or (ii) the second gate unit is activatable to express the second heterologous gene regulating moiety.
[0305] 37. A method for conversion of a plurality of stem cells towards pancreatic lineage, the method comprising:
   [0306] contacting a polynucleotide sequence in the plurality of stem cells by a heterologous gene regulating moiety to modulate expression level of a target gene that is operatively coupled to the polynucleotide sequence,
   [0307] wherein, within less than or equal to about 2 weeks following the contacting, a conversion rate from the plurality of stem cells to a plurality of pancreatic lineage cells is characterized to be at least about 5%.
[0308] 38. The method of Embodiment 37, wherein the plurality of pancreatic lineage cells comprises pancreatic progenitor cells
[0309] 39. The method of Embodiment 38, wherein the conversion rate from the plurality of stem cells to the pancreatic progenitor cells is at least about 10%, at least about 15%, at least about 20%, or at least about 25%.
[0310] 40. The method of Embodiment 37, wherein the plurality of pancreatic lineage cells comprises beta cells
[0311] 41. The method of Embodiment 40, the conversion rate from the plurality of stem cells to the beta cells is at least about 10%.
[0312] 42. The method of Embodiment 37, wherein the conversion rate is observed within less than or equal to about 12 days, less than or equal to about 10 days, or less than or equal to about 8 days.
[0313] 43. The method of Embodiment 37, wherein the expression level of the target gene is enhanced upon the contacting by the heterologous gene regulating moiety.
[0314] 44. The method of Embodiment 37, wherein the target gene comprises one or more members selected from the group consisting of a forkhead box (FOX), a SRY-related HMG-box (SOX), a GATA, a basic helix-loop-helix transcription factor (bHLH), a homeobox, and a Maf transcription factor.
[0315] 45. The method of Embodiment 44, wherein the target gene comprises two or more members selected from the group consisting of the FOX, the SOX, the GATA, the bHLH, the homeobox, and the Maf transcription factor.
[0316] 46. The method of Embodiment 37, wherein the target gene comprises a plurality of distinct target genes comprising a first distinct target and a second distinct target gene, and wherein the contacting comprises:
   [0317] (a) contacting a first polynucleotide sequence in the plurality of stem cells by a first heterologous gene regulating moiety to modulate expression level of the first distinct target gene that is operatively coupled to the first polynucleotide sequence; and
   [0318] (b) contacting a second polynucleotide sequence in the plurality of stem cells by a second heterologous gene regulating moiety, to modulate expression level of the second distinct target gene that is operatively coupled to the second polynucleotide sequence.
[0319] 47. The method of Embodiment 46, wherein the steps of (a) and (b) effect modulation of the first distinct target gene and the second distinct target gene in a sequential manner.
[0320] 48. The method of Embodiment 46, wherein the contacting comprises:
   [0321] contacting the plurality of stem cells with a heterologous genetic circuit comprising a plurality of gate units, wherein the heterologous genetic circuit is activatable to induce the plurality of gate units to modulate expression levels of the plurality of distinct target genes in a sequential manner to effect the conversion, and wherein the plurality of gate units comprises:
   [0322] (i) a first gate unit that is preconfigured to effect the first heterologous gene regulating moiety to modulate the expression level of the first distinct target gene; and
   [0323] (ii) a second gate unit that is preconfigured to effect the second heterologous gene regulating moiety to modulate the expression level of the second distinct target gene, wherein, upon activation of the heterologous genetic circuit, the plurality of gate units operates to effect the conversion.
[0324] 49. The method of Embodiment 46, wherein the plurality of distinct target genes comprises two or more members selected from the group consisting of the FOX, the SOX, the GATA, the bHLH, the homeobox, and the Maf transcription factor.
[0325] 50. The method of Embodiment 37, wherein the target gene is an endogenous gene.
[0326] 51. A method for treating a subject in need thereof, the method comprising:
   [0327] administering a plurality of pancreatic lineage cells to the subject, wherein the plurality of pancreatic lineage cells is prepared by subjecting a plurality of stem cells to ex vivo differentiation,
   [0328] wherein, within less than or equal to about 2 weeks of the ex vivo differentiation, a conversion rate from the plurality of stem cells to the plurality of pancreatic lineage cells is characterized to be at least about 5%.
[0329] 52. The method of Embodiment 51, wherein the plurality of pancreatic lineage cells comprises pancreatic progenitor cells.
[0330] 53. The method of Embodiment 52, wherein the conversion rate from the plurality of stem cells to the pancreatic progenitor cells is at least about 10%, at least about 15%, at least about 20%, or at least about 25%.
[0331] 54. The method of Embodiment 51, wherein the plurality of pancreatic lineage cells comprises beta cells.
[0332] 55. The method of Embodiment 53, wherein the conversion rate from the plurality of stem cells to the beta cells is at least about 10%.
[0333] 56. The method of Embodiment 51, wherein the conversion rate is observed within less than or equal to about 12 days, less than or equal to about 10 days, or less than or equal to about 8 days.
[0334] 57. The method of Embodiment 51, wherein the plurality of pancreatic lineage cells is subjected to ex vivo culture for less than or equal to about 4 weeks, less than or equal to about 3 weeks, less than or equal to about 2 weeks, less than or equal to about 12 days, less than or equal to about 10 days, or less than or equal to about 8 days.
[0335] 58. The method of Embodiment 51, wherein the ex vivo differentiation comprises modulating expression level of a target gene comprising one or more members selected from the group consisting of a forkhead box (FOX), a SRY-related HMG-box (SOX), a GATA, a basic helix-loop-helix transcription factor (bHLH), a homeobox, and a Maf transcription factor.
[0336] 59. The method of Embodiment 58, wherein the target gene comprises two or more members selected from the group consisting of the FOX, the SOX, the GATA, the bHLH, the homeobox, and the Maf transcription factor.
[0337] 60. The method of Embodiment 58, wherein the target gene is an endogenous target gene.
[0338] 61. The method of any one of the preceding Embodiments, wherein the plurality of pancreatic lineage cells comprises pancreatic progenitor cells or pancreatic beta cells.
[0339] 62. The method of any one of the preceding Embodiments, wherein the plurality of pancreatic lineage cells is characterized to be ECAD+/CD142+ or CD49a+.
[0340] 63. The method of any one of the preceding Embodiments, wherein the plurality of pancreatic lineage cells is characterized to generate insulin.
[0341] 64. The method of any one of the preceding Embodiments, wherein the plurality of stem cells comprise pluripotent stem cells (PSCs) or endodermal cells.
[0342] 65. The method of any one of the preceding Embodiments, wherein the plurality of distinct target genes are endogenous genes of the plurality of stem cells.
[0343] 66. The method of any one of the preceding Embodiments, wherein the first heterologous gene regulating moiety or the second heterologous gene regulating moiety comprises (i) an endonuclease or (ii) a guide nucleic acid (gNA) molecule.
[0344] 67. The method of Embodiment 66, wherein the endonuclease and the gNA form a complex capable of binding to a respective target polynucleotide sequence.
[0345] 68. The method of Embodiment 66, wherein the endonuclease is a Cas protein.
[0346] 69. The method of any one of the preceding Embodiments, wherein the conversion occurs in conditions substantially free of (i) serum and/or (ii) an exogenous cell differentiation regulatory factor.
[0347] 70. The method of Embodiment 69, wherein the exogenous cell differentiation regulatory factor comprises one or more members selected from the group consisting of insulin-like growth factor (IGF), transforming growth factor (TGF), fibroblast growth factor (EGF), epidermal growth factor (EGF), hepatocyte growth factor (HGF), sonic hedgehog (SHH), and vascular endothelial growth factor (VEGF), transforming growth factor-β (TGFβ) superfamily, bone morphogenic protein-2 (BMP2), and bone morphogenic protein-7 (BMP7).
[0348] 71. The method of Embodiment 69, wherein the exogenous cell differentiation regulatory factor comprises one or more members selected from the group consisting of a GSK3β inhibitor, an ALK inhibitor, a BMP type 1 receptor inhibitor, and retinoic acid.
[0349] 72. The method of any one of the preceding Embodiments, wherein the FOX comprises one or more members selected from the group consisting of FOXA, FOXB, FOXC, FOXD, FOXE, FOXF, FOXG, FOXH, FOXI, FOXJ, FOXK, FOXL, FOXM, FOXN, FOXO, FOXP, FOXQ, FOXR, and FOXS.
[0350] 73. The method of Embodiment 72, wherein the FOX is FOXA1, FOXA2, or FOXA3.
[0351] 74. The method of Embodiment 73, wherein the FOX is FOXA2.
[0352] 75. The method of any one of the preceding Embodiments, wherein the SOX comprises one or more members selected from the group consisting of SOXA, SOXB1, SOXB2, SOXC, SOXD, SOXE, SOXF, SOXG, and SOXH.
[0353] 76. The method of Embodiment 75, wherein the SOX is SOXE.
[0354] 77. The method of Embodiment 76, wherein the SOXE is SOX9.
[0355] 78. The method of Embodiment 75, wherein the SOX is SOXF.
[0356] 79. The method of Embodiment 78, wherein the SOXF is SOX17.
[0357] 80. The method of any one of the preceding Embodiments, wherein the SOX is not SOX2.
[0358] 81. The method of any one of the preceding Embodiments, wherein the SOX is not SOXB1 or SOXB2.
[0359] 82. The method of any one of the preceding Embodiments, wherein the GATA comprises one or more members selected from the group consisting of GATA1, GATA2, GATA3, GATA4, GATA5, and GATA6.
[0360] 83. The method of Embodiment 82, wherein the GATA is GATA4.
[0361] 84. The method of any one of the preceding Embodiments, wherein the TBX comprises one or more members selected from the group consisting of TBXT, TBR1, TBX1, TBX2, TBX3, TBX4, TBX5, TBX6, TBX10, TBX15, TBX18, TBX19, TBX20, TBX21, and TBX22.
[0362] 85. The method of Embodiment 84, wherein the TBX is TBXT.
[0363] 86. The method of any one of the preceding Embodiments, wherein the plurality of distinct target genes does not comprise TBXT.
[0364] 87. The method of any one of the preceding Embodiments, wherein the bHLH comprises one or more members selected from the group consisting of Group A bHLH, Group B bHLH, Group C bHLH, Group D bHLH, Group E bHLH, and Group F bHLH.
[0365] 88. The method of Embodiment 87, wherein the bHLH is the Group A bHLH.
[0366] 89. The method of Embodiment 87, wherein the bHLH is NEUROG3, NEUROD1, or PTF1a.
[0367] 90. The method of any one of the preceding Embodiments, wherein the homeobox comprises a ParaHox gene comprising one or more members selected from the group consisting of CDX1, CDX2, CDX4, GSX1, GSX2, and PDX1.
[0368] 91. The method of Embodiment 90, wherein the ParaHox gene is PDX1.
[0369] 92. The method of any one of the preceding Embodiments, wherein the homeobox comprises a NKX-class homeobox comprising one or more members selected from the group consisting of NKX2-1, NKX2-4, NKX2-2, NKX2-8, NKX3-1, NKX3-2, NKX2-3, NKX2-5, NKX2-6, HMX1, HMX2, HMX3, NKX6-1, NKX6-2, and NKX6-3.
[0370] 93. The method of Embodiment 92, wherein the NKX-class homeobox is NKX6-1 or NKX2-2.
[0371] 94. The method of any one of the preceding Embodiments, wherein the homeobox comprises a paired box (PRD)-class homeobox comprising one or more members selected from the group consisting of ALX1, ALX3, ALX4, ARGFX, ARX, DMBX1, DPRX, DRGX, DUXA, DUXB, DUX (1, 2, 3, 4, 4c, 5), ESX1, GSC, GSC2, HESX1, HOPX, ISX, LEUTX, MIXL1, NOBOX, OTP, OTX1, OTX2, CRX, PAX2, PAX3, PAX4, PAX5, PAX6, PAX7, PAX8, PHOX2A, PHOX2B, PITX1, PITX2, PITX3, PROPI, PRRX1, PRRX2, RAX, RAX2, RHOXF1, RHOXF2/2B, SEBOX, SHOX, SHOX2, TPRX1, UNCX, VSX1, and VSX2.
[0372] 95. The method of Embodiment 94, wherein the PRD-class is PAX6.
[0373] 96. The method of any one of the preceding Embodiments, wherein the first homeobox protein, the second homeobox protein, or the homeobox protein is not a member of Pax3 and Pax7.
[0374] 97. The method of any one of the preceding Embodiments, wherein the homeobox comprises a CUT-class homeobox comprising one or more members selected from the group consisting of ONECUT1, ONECUT2, ONECUT3, CUX1, CUX2, SATB1, and SATB2.
[0375] 98. The method of Embodiment 97, wherein the CUT-class homeobox is ONECUT1.
[0376] 99. The method of any one of the preceding Embodiments, wherein the homeobox comprises a LIM-class homeobox comprising one or more members selected from the group consisting of ISL1, ISL2, LHX1, LHX2, LHX3, LHX4, LHX5, LHX6, LHX8, LHX9, LMX1A, and LMX1B.
[0377] 100. The method of Embodiment 99, wherein the LIM-class homeobox is ISL1.
[0378] 101. The method of any one of the preceding Embodiments, wherein the conversion occurs in less than about 14 days or less than about 10 days.
[0379] 102. The method of any one of the preceding Embodiments, further comprising storing the plurality of pancreatic lineage cells in a sterile vial.
[0380] 103. The method of any one of the preceding Embodiments, wherein the conversion effects formation of an islet comprising the plurality of pancreatic lineage cells.
[0381] 104. The method of any one of the preceding Embodiments, further comprising generating an islet comprising the plurality of pancreatic lineage cells.
[0382] 105. The method of Embodiment 104, wherein the islet is for administration to a subject in need thereof.
[0383] 106. The method of any one of the preceding Embodiments, further comprising loading the plurality of pancreatic lineage cells in or on a scaffold.
[0384] 107. The method of Embodiment 106, wherein the scaffold and the plurality of pancreatic lineage cells, in combination, are for transplantation to a subject in need thereof.
[0385] 108. The method of any one of the preceding Embodiments, further comprising administering the plurality of pancreatic lineage cells to a subject in need thereof.
[0386] 109. The method of any one of the preceding Embodiments, wherein the administering comprises one or more liver portal vein injections.
[0387] 110. The method of any one of the preceding Embodiments, wherein the administering comprises one or more subcutaneous implantations.
[0388] 111. The method of any one of the preceding Embodiments, wherein the subject has or is suspected of having diabetes.
[0389] 112. The method of any one of the preceding Embodiments, wherein the conversion is characterized by producing less non-endodermal cells or less enterochromaffin cells, as compared to a control conversion of a plurality of stem cells in a medium comprising (i) serum and/or (ii) an exogenous cell differentiation regulatory factor.
[0390] 113. A system for conversion of a plurality of stem cells into a plurality of pancreatic lineage cells, the system comprising:
   [0391] a heterologous genetic circuit comprising a plurality of gate units, wherein the heterologous genetic circuit is activatable to induce the plurality of gate units to modulate expression levels of a plurality of distinct target genes in a sequential manner to effect the conversion, wherein the plurality of gate units comprises:
      [0392] (i) a first gate unit that is preconfigured to modulate expression level of a first target gene of the plurality of distinct target genes, wherein the first target gene comprises one or more members selected from the group consisting of a forkhead box (FOX), a SRY-related HMG-box (SOX), and a GATA; and
      [0393] (ii) a second gate unit that is preconfigured to modulate expression level of a second target gene of the plurality of distinct target genes, such that the expression levels of the first target gene and the second target gene are modulated in the sequential manner,
   [0394] wherein, upon activation of the heterologous genetic circuit, the plurality of gate units operates to effect the conversion.
[0395] 114. The system of Embodiment 113, wherein the first target gene comprises two or more members selected from the group consisting of the FOX, the SOX, and the GATA.
[0396] 115. The system of Embodiment 113, wherein the first target gene comprises the FOX, the SOX, and the GATA.
[0397] 116. The system of Embodiment 113, wherein the first target gene further comprises a T-box transcription factor (TBX).
[0398] 117. The system of Embodiment 113, wherein the second target gene comprises one or more members selected from the group consisting of a basic helix-loop-helix transcription factor (bHLH), a homeobox, and a Maf transcription factor.
[0399] 118. The system of Embodiment 113, wherein (i) the expression level of the first target gene is enhanced by the first gate unit or (ii) the expression level of the second target gene is enhanced by the second gate unit.
[0400] 119. A system for conversion of a plurality of stem cells into a plurality of pancreatic lineage cells, via modulation of expression levels of a plurality of distinct target genes comprising a first target gene and a second target gene, the system comprising:
   [0401] a) a first heterologous gene regulating moiety configured to bind a first polynucleotide sequence in the plurality of stem cells to modulate expression level of the first target gene that is operatively coupled to the first polynucleotide sequence, wherein the first target gene comprises one or more members selected from the group consisting of a forkhead box (FOX), a SRY-related HMG-box (SOX), and a GATA; and
   [0402] b) a second heterologous gene regulating moiety configured to bind a second polynucleotide sequence in the plurality of stem cells to modulate expression level of the second target gene that is operatively coupled to the second polynucleotide sequence, wherein the second target gene comprises one or more members selected from the group consisting of a basic helix-loop-helix transcription factor (bHLH), a homeobox, and a Maf transcription factor.
[0403] 120. The system of Embodiment 119, wherein the first heterologous gene regulating moiety and the second heterologous gene regulating moiety are configured to effect modulation of the first target gene and the second target gene, respectively, in a sequential manner.
[0404] 121. The system of Embodiment 119, wherein the first target gene comprises two or more members selected from the group consisting of the FOX, the SOX, and the GATA.
[0405] 122. The system of Embodiment 119, wherein the first target gene comprises the FOX, the SOX, and the GATA.
[0406] 123. The system of Embodiment 119, wherein the second target gene comprises two or more members selected from the group consisting of the bHLH, the homeobox, and the Maf.
[0407] 124. The system of Embodiment 119, wherein the second target gene comprises the bHLH, the homeobox, and the Maf.
[0408] 125. The system of Embodiment 119, wherein (i) the first polynucleotide sequence is upstream to or encodes the first target gene or (ii) the second polynucleotide sequence is upstream to or encodes the second target gene.
[0409] 126. The system of Embodiment 119, wherein (i) the expression level of the first target gene is enhanced upon the contacting by the first heterologous gene regulating moiety or (ii) the expression level of the second target gene is enhanced upon the contacting by the second heterologous gene regulating moiety.
[0410] 127. The system of Embodiment 119, comprising a heterologous genetic circuit comprising a plurality of gate units, wherein the heterologous genetic circuit is activatable to induce the plurality of gate units to modulate expression levels of the plurality of distinct target genes in a sequential manner to effect the conversion, and wherein the plurality of gate units comprises:
   [0411] (i) a first gate unit that is preconfigured to effect the first heterologous gene regulating moiety to modulate the expression level of the first target gene; and
   [0412] (ii) a second gate unit that is preconfigured to effect the second heterologous gene regulating moiety to modulate the expression level of the second target gene,
   [0413] wherein, upon activation of the heterologous genetic circuit, the plurality of gate units operates to effect the conversion.
[0414] 128. The system of Embodiment 127, wherein (i) the first gate unit is activatable to express the first heterologous gene regulating moiety or (ii) the second gate unit is activatable to express the second heterologous gene regulating moiety.
[0415] 129. A system for conversion of a plurality of stem cells into a plurality of pancreatic lineage cells, via modulation of expression levels of a plurality of distinct target genes comprising a first target gene and a second target gene, the system comprising:
   [0416] a) a first heterologous gene regulating moiety configured to bind a first polynucleotide sequence in the plurality of stem cells to modulate expression level of the first target gene that is operatively coupled to the first polynucleotide sequence, wherein the first target gene comprises one or more members selected from the group consisting of a forkhead box (FOX), a SRY-related HMG-box (SOX), a GATA, a basic helix-loop-helix transcription factor (bHLH), a homeobox, and a Maf transcription factor; and
   [0417] b) a second heterologous gene regulating moiety configured to bind a second polynucleotide sequence in the plurality of stem cells to reduce expression level of the second target gene that is operatively coupled to the second polynucleotide sequence, wherein the second target gene comprises one or more members selected from the group consisting of an additional SOX, an additional homeobox, and a EST transcription factor.
[0418] 130. The system of Embodiment 129, wherein the first heterologous gene regulating moiety and the second heterologous gene regulating moiety are configured to effect modulation of the first target gene and reduced expression level of the second target gene, respectively, in a sequential manner.
[0419] 131. The system of Embodiment 129, wherein the first heterologous gene regulating moiety and the second heterologous gene regulating moiety are configured to effect reduced expression of the second target gene and modulation of the first target gene, respectively, in a sequential manner.
[0420] 132. The system of Embodiment 129, wherein the first heterologous gene regulating moiety and the second heterologous gene regulating moiety are configured effect modulation of the first and second target genes simultaneously.
[0421] 133. The system of Embodiment 129, wherein the additional SOX is not a member from SOX9 and SOX17.
[0422] 134. The system of Embodiment 129, wherein the additional SOX comprises SOX2.
[0423] 135. The system of Embodiment 129, wherein the additional homeobox is not a member from PDX1, NKX6-1, NKX2-2, PAX6, ONECUT1, and ISL1.
[0424] 136. The system of Embodiment 129, wherein the additional homeobox comprises CDX1, CDX2, or CDX4.
[0425] 137. The system of Embodiment 136, wherein the additional homeobox comprises CDX2.
[0426] 138. The system of Embodiment 129, wherein the additional homeobox comprises LMX1A or LMX1B.
[0427] 139. The system of Embodiment 138, wherein the additional homeobox comprises LMX1A.
[0428] 140. The system of Embodiment 129, wherein the EST transcription factor comprises ERG, FLI1, or FEV.
[0429] 141. The system of Embodiment 140, wherein the EST transcription factor comprises FEV.
[0430] 142. The system of Embodiment 129, wherein the first target gene comprises two or more members selected from the group consisting of the FOX, the SOX, the GATA, the bHLH, the homeobox, and the Maf transcription factor.
[0431] 143. The system of Embodiment 129, wherein the first target gene comprises one or more members selected from the group consisting of the FOX, the SOX, and the GATA.
[0432] 144. The system of Embodiment 129, wherein the first target gene comprises one or more members selected from the group consisting of the bHLH, the homeobox, and the Maf transcription factor.
[0433] 145. The system of Embodiment 129, wherein (i) the first polynucleotide sequence is upstream to or encodes the first target gene or (ii) the second polynucleotide sequence is upstream to or encodes the second target gene.
[0434] 146. The system of Embodiment 129, wherein the expression level of the first target gene is enhanced upon the contacting by the first heterologous gene regulating moiety.
[0435] 147. The system of Embodiment 129, comprising a heterologous genetic circuit comprising a plurality of gate units, wherein the heterologous genetic circuit is activatable to induce the plurality of gate units to modulate expression levels of the plurality of distinct target genes in a sequential manner to effect the conversion, and wherein the plurality of gate units comprises:
   [0436] (i) a first gate unit that is preconfigured to effect the first heterologous gene regulating moiety to modulate the expression level of the first target gene; and
   [0437] (ii) a second gate unit that is preconfigured to effect the second heterologous gene regulating moiety to reduce the expression level of the second target gene,
   [0438] wherein, upon activation of the heterologous genetic circuit, the plurality of gate units operates to effect the conversion.
[0439] 148. The system of Embodiment 147, wherein (i) the first gate unit is activatable to express the first heterologous gene regulating moiety or (ii) the second gate unit is activatable to express the second heterologous gene regulating moiety.
[0440] 149. A system for conversion of a plurality of stem cells towards pancreatic lineage, the system comprising:
   [0441] a heterologous gene regulating moiety configured to bind a polynucleotide sequence in the plurality of stem cells to modulate expression level of a target gene that is operatively coupled to the polynucleotide sequence,
   [0442] wherein, within less than or equal to about 2 weeks following the contacting, a conversion rate from the plurality of stem cells to a plurality of pancreatic lineage cells is characterized to be at least about 5%.
[0443] 150. The system of Embodiment 149, wherein the plurality of pancreatic lineage cells comprises pancreatic progenitor cells.
[0444] 151. The system of Embodiment 150, wherein the conversion rate from the plurality of stem cells to the pancreatic progenitor cells is at least about 10%, at least about 15%, at least about 20%, or at least about 25%.
[0445] 152. The system of Embodiment 149, wherein the plurality of pancreatic lineage cells comprises beta cells.
[0446] 153. The system of Embodiment 152, wherein the conversion rate from the plurality of stem cells to the beta cells is at least about 10%.
[0447] 154. The system of Embodiment 149, wherein the conversion rate is observed within less than or equal to about 12 days, less than or equal to about 10 days, or less than or equal to about 8 days.
[0448] 155. The system of Embodiment 149, wherein the expression level of the target gene is enhanced upon the contacting by the heterologous gene regulating moiety.
[0449] 156. The system of Embodiment 149, wherein the target gene comprises one or more members selected from the group consisting of a forkhead box (FOX), a SRY-related HMG-box (SOX), a GATA, a basic helix-loop-helix transcription factor (bHLH), a homeobox, and a Maf transcription factor.
[0450] 157. The system of Embodiment 156, wherein the target gene comprises two or more members selected from the group consisting of the FOX, the SOX, the GATA, the bHLH, the homeobox, and the Maf transcription factor.
[0451] 158. The system of Embodiment 149, wherein the target gene comprises a plurality of distinct target genes comprising a first distinct target and a second distinct target gene, and wherein the system comprises:
[0452] a) a first heterologous gene regulating moiety configured to bind a first polynucleotide sequence in the plurality of stem cells to modulate expression level of the first distinct target gene that is operatively coupled to the first polynucleotide sequence; and
[0453] b) a second heterologous gene regulating moiety configured to bind a second polynucleotide sequence in the plurality of stem cells to modulate expression level of the second distinct target gene that is operatively coupled to the second polynucleotide sequence.
[0454] 159. The system of Embodiment 158, wherein the first and second heterologous gene regulating moieties are configured to effect modulation of the first distinct target gene and the second distinct target gene in a sequential manner.
[0455] 160. The system of Embodiment 158, comprising a heterologous genetic circuit comprising a plurality of gate units, wherein the heterologous genetic circuit is activatable to induce the plurality of gate units to modulate expression levels of the plurality of distinct target genes in a sequential manner to effect the conversion, and wherein the plurality of gate units comprises:
   [0456] (i) a first gate unit that is preconfigured to effect the first heterologous gene regulating moiety to modulate the expression level of the first distinct target gene; and
   [0457] (ii) a second gate unit that is preconfigured to effect the second heterologous gene regulating moiety to modulate the expression level of the second distinct target gene,
   [0458] wherein, upon activation of the heterologous genetic circuit, the plurality of gate units operates to effect the conversion.
[0459] 161. The system of Embodiment 158, wherein the plurality of distinct target genes comprises two or more members selected from the group consisting of the FOX, the SOX, the GATA, the bHLH, the homeobox, and the Maf transcription factor.
[0460] 162. The system of Embodiment 149, wherein the target gene is an endogenous gene.
[0461] 163. A composition comprising the system of any one of the preceding Embodiments.
[0462] 164. A composition for treating a subject in need thereof, the composition comprising:
   [0463] a plurality of pancreatic lineage cells prepared by subjecting a plurality of stem cells to ex vivo differentiation,
   [0464] wherein, within less than or equal to about 2 weeks of the ex vivo differentiation, a conversion rate from the plurality of stem cells to the plurality of pancreatic lineage cells is characterized to be at least about 5%.
[0465] 165. The composition of Embodiment 164, wherein the plurality of pancreatic lineage cells comprises pancreatic progenitor cells.
[0466] 166. The composition of Embodiment 165, wherein the conversion rate from the plurality of stem cells to the pancreatic progenitor cells is at least about 10%, at least about 15%, at least about 20%, or at least about 25%.
[0467] 167. The composition of Embodiment 164, wherein the plurality of pancreatic lineage cells comprises beta cells.
[0468] 168. The composition of Embodiment 167, wherein the conversion rate from the plurality of stem cells to the beta cells is at least about 10%.
[0469] 169. The composition of Embodiment 164, wherein the conversion rate is observed within less than or equal to about 12 days, less than or equal to about 10 days, or less than or equal to about 8 days.
[0470] 170. The composition of Embodiment 164, wherein the plurality of pancreatic lineage cells is subjected to ex vivo culture for less than or equal to about 4 weeks, less than or equal to about 3 weeks, less than or equal to about 2 weeks, less than or equal to about 12 days, less than or equal to about 10 days, or less than or equal to about 8 days.
[0471] 171. The composition of Embodiment 164, wherein the ex vivo differentiation comprises modulating expression level of a target gene comprising one or more members selected from the group consisting of a forkhead box (FOX), a SRY-related HMG-box (SOX), a GATA, a basic helix-loop-helix transcription factor (bHLH), a homeobox, and a Maf transcription factor.
[0472] 172. The composition of Embodiment 171, wherein the target gene comprises two or more members selected from the group consisting of the FOX, the SOX, the GATA, the bHLH, the homeobox, and the Maf transcription factor.
[0473] 173. The composition of Embodiment 171, wherein the target gene is an endogenous target gene.
[0474] 174. The system or composition of any one of the preceding Embodiments, wherein the plurality of pancreatic lineage cells comprises pancreatic progenitor cells or pancreatic beta cells.
[0475] 175. The system or composition of any one of the preceding Embodiments, wherein the plurality of pancreatic lineage cells is characterized to be ECAD+/CD142+ or CD49a+.
[0476] 176. The system or composition of any one of the preceding Embodiments, wherein the plurality of pancreatic lineage cells is characterized to generate insulin.
[0477] 177. The system or composition of any one of the preceding Embodiments, wherein the plurality of stem cells comprise pluripotent stem cells (PSCs) or mesodermal cells.
[0478] 178. The system or composition of any one of the preceding Embodiments, wherein the plurality of distinct target genes are endogenous genes of the plurality of stem cells.
[0479] 179. The system or composition of any one of the preceding Embodiments, wherein the first heterologous gene regulating moiety or the second heterologous gene regulating moiety comprises (i) an endonuclease or (ii) a guide nucleic acid (gNA) molecule.
[0480] 180. The system or composition of any one of the preceding Embodiments, wherein the endonuclease and the gNA form a complex capable of binding to a respective target polynucleotide sequence.
[0481] 181. The system or composition of any one of the preceding Embodiments, wherein the endonuclease is a Cas protein.
[0482] 182. The system or composition of any one of the preceding Embodiments, wherein the conversion occurs in conditions substantially free of (i) serum and/or (ii) an exogenous cell differentiation regulatory factor.
[0483] 183. The system or composition of any one of the preceding Embodiments, wherein the exogenous cell differentiation regulatory factor comprises one or more members selected from the group consisting of insulin-like growth factor (IGF), transforming growth factor (TGF), fibroblast growth factor (EGF), epidermal growth factor (EGF), hepatocyte growth factor (HGF), sonic hedgehog (SHH), and vascular endothelial growth factor (VEGF), transforming growth factor-β (TGFβ) superfamily, bone morphogenic protein-2 (BMP2), and bone morphogenic protein-7 (BMP7).
[0484] 184. The system or composition of any one of the preceding Embodiments, wherein the exogenous cell differentiation regulatory factor comprises one or more members selected from the group consisting of a GSK3β inhibitor, an ALK inhibitor, a BMP type 1 receptor inhibitor, and retinoic acid.
[0485] 185. The system or composition of any one of the preceding Embodiments, wherein the FOX comprises one or more members selected from the group consisting of FOXA, FOXB, FOXC, FOXD, FOXE, FOXF, FOXG, FOXH, FOXI, FOXJ, FOXK, FOXL, FOXM, FOXN, FOXO, FOXP, FOXQ, FOXR, and FOXS.
[0486] 186. The system or composition of any one of the preceding Embodiments, wherein the FOX is FOXB1, FOXA2, or FOXA3.
[0487] 187. The system or composition of any one of the preceding Embodiments, wherein the FOX is FOXA2.
[0488] 188. The system or composition of any one of the preceding Embodiments, wherein the SOX comprises one or more members selected from the group consisting of SOXA, SOXB1, SOXB2, SOXC, SOXD, SOXE, SOXF, SOXG, and SOXH.
[0489] 189. The system or composition of any one of the preceding Embodiments, wherein the SOX is SOXE.
[0490] 190. The system or composition of any one of the preceding Embodiments, wherein the SOXE is SOX9.
[0491] 191. The system or composition of any one of the preceding Embodiments, wherein the SOX is SOXF.
[0492] 192. The system or composition of any one of the preceding Embodiments, wherein the SOXF is SOX17.
[0493] 193. The system or composition of any one of the preceding Embodiments, wherein the SOX is not SOX2.
[0494] 194. The system or composition of any one of the preceding Embodiments, wherein the SOX is not SOXB1 or SOXB2.
[0495] 195. The system or composition of any one of the preceding Embodiments, wherein the GAGA comprises one or more members selected from the group consisting of GATB1, GATA2, GATA3, GATA4, GATA5, and GATA6.
[0496] 196. The system or composition of any one of the preceding Embodiments, wherein the GATA is GATA4.
[0497] 197. The system or composition of any one of the preceding Embodiments, wherein the TBX comprises one or more members selected from the group consisting of TBXT, TBR1, TBX1, TBX2, TBX3, TBX4, TBX5, TBX6, TBX10, TBX15, TBX18, TBX19, TBX20, TBX21, and TBX22.
[0498] 198. The system or composition of any one of the preceding Embodiments, wherein the TBX is TBXT.
[0499] 199. The system or composition of any one of the preceding Embodiments, wherein the plurality of distinct target genes does not comprise TBXT.
[0500] 200. The system or composition of any one of the preceding Embodiments, wherein the bHLH comprises one or more members selected from the group consisting of Group A bHLH, Group B bHLH, Group C bHLH, Group D bHLH, Group E bHLH, and Group F bHLH.
[0501] 201. The system or composition of any one of the preceding Embodiments, wherein the bHLH is the Group A bHLH.
[0502] 202. The system or composition of any one of the preceding Embodiments, wherein the bHLH is NEUROG3, NEUROD1, or PTF1a.
[0503] 203. The system or composition of any one of the preceding Embodiments, wherein the homeobox comprises a ParaHox gene comprising one or more members selected from the group consisting of CDX1, CDX2, CDX4, GSX1, GSX2, and PDX1.
[0504] 204. The system or composition of any one of the preceding Embodiments, wherein the ParaHox gene is PDX1.
[0505] 205. The system or composition of any one of the preceding Embodiments, wherein the homeobox comprises a NKX-class homeobox comprising one or more members selected from the group consisting of NKX2-1, NKX2-4, NKX2-2, NKX2-8, NKX3-1, NKX3-2, NKX2-3, NKX2-5, NKX2-6, HMX1, HMX2, HMX3, NKX6-1, NKX6-2, and NKX6-3.
[0506] 206. The system or composition of any one of the preceding Embodiments, wherein the NKX-class homeobox is NKX6-1 or NKX2-2.
[0507] 207. The system or composition of any one of the preceding Embodiments, wherein the homeobox comprises a paired box (PRD)-class homeobox comprising one or more members selected from the group consisting of ALX1, ALX3, ALX4, ARGFX, ARX, DMBX1, DPRX, DRGX, DUXA, DUXB, DUX (1, 2, 3, 4, 4c, 5), ESX1, GSC, GSC2, HESX1, HOPX, ISX, LEUTX, MIXL1, NOBOX, OTP, OTX1, OTX2, CRX, PAX2, PAX3, PAX4, PAX5, PAX6, PAX7, PAX8, PHOX2A, PHOX2B, PITX1, PITX2, PITX3, PROP1, PRRX1, PRRX2, RAX, RAX2, RHOXF1, RHOXF2/2B, SEBOX, SHOX, SHOX2, TPRX1, UNCX, VSX1, and VSX2.
[0508] 208. The system or composition of any one of the preceding Embodiments, wherein the PRD-class is PAX6.
[0509] 209. The system or composition of any one of the preceding Embodiments, wherein the first homeobox protein, the second homeobox protein, or the homeobox protein is not a member of Pax3 and Pax7.
[0510] 210. The system or composition of any one of the preceding Embodiments, wherein the homeobox comprises a CUT-class homeobox comprising one or more members selected from the group consisting of ONECUT1, ONECUT2, ONECUT3, CUX1, CUX2, SATB1, and SATB2.
[0511] 211. The system or composition of any one of the preceding Embodiments, wherein the CUT-class homeobox is ONECUT1.
[0512] 212. The system or composition of any one of the preceding Embodiments, wherein the homeobox comprises a LIM-class homeobox comprising one or more members selected from the group consisting of ISL1, ISL2, LHX1, LHX2, LHX3, LHX4, LHX5, LHX6, LHX8, LHX9, LMX1A, and LMX1B.
[0513] 213. The system or composition of any one of the preceding Embodiments, wherein the LIM-class homeobox is ISL1.
[0514] 214. The system or composition of any one of the preceding Embodiments, wherein the conversion occurs in less than about 14 days or less than about 10 days.
[0515] 215. The system or composition of any one of the preceding Embodiments, wherein the conversion effects formation of an islet comprising the plurality of pancreatic lineage cells.
[0516] 216. The system or composition of any one of the preceding Embodiments, wherein the conversion is characterized by producing less non-endodermal cells or less enterochromaffin cells, as compared to a control conversion of a plurality of stem cells in a medium comprising (i) serum and/or (ii) an exogenous cell differentiation regulatory factor.

[0517] Systems and methods of the present disclosure may be combined with or modified by other systems and methods for cell programming, such as, for example, those described in International Patent Application No. PCT/US2018/052211, International Patent Application No. PCT/US2018/052211, International Patent Application No. PCT/US2023/028169, International Patent Application No. PCT/US2023/028255, and International Patent Application No. PCT/US2023/028033, each of which is incorporated herein by reference in its entirety.

[0518] While preferred embodiments of the present invention have been shown and described herein, it will be obvious to those skilled in the art that such embodiments are provided by way of example only. It is not intended that the invention be limited by the specific examples provided within the specification. While the invention has been described with reference to the aforementioned specification, the descriptions and illustrations of the embodiments herein are not meant to be construed in a limiting sense. Numerous variations, changes, and substitutions will now occur to those skilled in the art without departing from the invention. Furthermore, it shall be understood that all aspects of the invention are not limited to the specific depictions, configurations or relative proportions set forth herein which depend upon a variety of conditions and variables. It should be understood that various alternatives to the embodiments of the invention described herein may be employed in practicing the invention. It is therefore contemplated that the invention shall also cover any such alternatives, modifications, variations or equivalents. It is intended that the following claims define the scope of the invention and that methods and structures within the scope of these claims and their equivalents be covered thereby.

The application's sequence listing, which the Patent Office published only in electronic form, follows.

SEQUENCE LISTING (2167 sequences)

SEQ ID NO: 1 - DNA, 103 bp, synthetic construct
  source 1..103: mol_type = other DNA
gaactgctaaatatgttttagagctaccgtcgttgtaccgtctacttgacttttttttcagccaactccaattttttttgtcaagtagacggtacaacgacgg

SEQ ID NO: 2 - DNA, 104 bp, synthetic construct
  source 1..104: mol_type = other DNA
gcaattcctccacacgttttagagctaccgtcgttgtaccgtctacttgacttttttttcagccaactccaattttttttgtcaagtagacggtacaacgacgg

SEQ ID NO: 3 - DNA, 104 bp, synthetic construct
  source 1..104: mol_type = other DNA
gtcaagtgtcactaagttttagagctaccgtcgttgtaccgtctacttgacttttttttcagccaactccaattttttttgtcaagtagacggtacaacgacgg

SEQ ID NO: 4 - DNA, 104 bp, synthetic construct
  source 1..104: mol_type = other DNA
gaccataaatatcctgttttagagctaccgtcgttgtaccgtctacttgacttttttttcagccaactccaattttttttgtcaagtagacggtacaacgacgg

SEQ ID NO: 5 - DNA, 101 bp, synthetic construct
  source 1..101: mol_type = other DNA
gaactgctaaatatgttttagagctacctacactcgacatcggtagctattttttttcagccaactccaatttttttttagctaccgatgtcgagtgtagg

SEQ ID NO: 6 - DNA, 102 bp, synthetic construct
  source 1..102: mol_type = other DNA
gcaattcctccacacgttttagagctacctacactcgacatcggtagctattttttttcagccaactccaatttttttttagctaccgatgtcgagtgtagg

SEQ ID NO: 7 - DNA, 102 bp, synthetic construct
  source 1..102: mol_type = other DNA
gtcaagtgtcactaagttttagagctacctacactcgacatcggtagctattttttttcagccaactccaatttttttttagctaccgatgtcgagtgtagg

SEQ ID NO: 8 - DNA, 102 bp, synthetic construct
  source 1..102: mol_type = other DNA
gaccataaatatcctgttttagagctacctacactcgacatcggtagctattttttttcagccaactccaatttttttttagctaccgatgtcgagtgtagg

SEQ ID NO: 9 - DNA, 101 bp, synthetic construct
  source 1..101: mol_type = other DNA
gaactgctaaatatgttttagagctaccctggcggaacgttcgagtaatttttttttcagccaactccaattttttttattactcgaacgttccgccaggg

SEQ ID NO: 10 - DNA, 102 bp, synthetic construct
  source 1..102: mol_type = other DNA
gcaattcctccacacgttttagagctaccctggcggaacgttcgagtaatttttttttcagccaactccaattttttttattactcgaacgttccgccaggg

SEQ ID NO: 11 - DNA, 102 bp, synthetic construct
  source 1..102: mol_type = other DNA
gtcaagtgtcactaagttttagagctaccctggcggaacgttcgagtaatttttttttcagccaactccaattttttttattactcgaacgttccgccaggg

SEQ ID NO: 12 - DNA, 102 bp, synthetic construct
  source 1..102: mol_type = other DNA
gaccataaatatcctgttttagagctaccctggcggaacgttcgagtaatttttttttcagccaactccaattttttttattactcgaacgttccgccaggg

SEQ ID NO: 13 - DNA, 101 bp, synthetic construct
  source 1..101: mol_type = other DNA
gaactgctaaatatgttttagagctacctacacgatagtggtcgtgcgcttttttttcagccaactccaattttttttgcgcacgaccactatcgtgtagg

SEQ ID NO: 14 - DNA, 102 bp, synthetic construct
  source 1..102: mol_type = other DNA
gcaattcctccacacgttttagagctacctacacgatagtggtcgtgcgcttttttttcagccaactccaattttttttgcgcacgaccactatcgtgtagg

SEQ ID NO: 15 - DNA, 102 bp, synthetic construct
  source 1..102: mol_type = other DNA
gtcaagtgtcactaagttttagagctacctacacgatagtggtcgtgcgcttttttttcagccaactccaattttttttgcgcacgaccactatcgtgtagg

SEQ ID NO: 16 - DNA, 102 bp, synthetic construct
  source 1..102: mol_type = other DNA
gaccataaatatcctgttttagagctacctacacgatagtggtcgtgcgcttttttttcagccaactccaattttttttgcgcacgaccactatcgtgtagg

SEQ ID NO: 17 - DNA, 103 bp, synthetic construct
  source 1..103: mol_type = other DNA
gaactgctaaatatgttttagagctaccttcccgacttccgtaggagcgcttttttttcagccaactccaattttttttgcgctcctacggaagtcgggaagg

SEQ ID NO: 18 - DNA, 104 bp, synthetic construct
  source 1..104: mol_type = other DNA
gcaattcctccacacgttttagagctaccttcccgacttccgtaggagcgcttttttttcagccaactccaattttttttgcgctcctacggaagtcgggaagg

SEQ ID NO: 19 - DNA, 104 bp, synthetic construct
  source 1..104: mol_type = other DNA
gtcaagtgtcactaagttttagagctaccttcccgacttccgtaggagcgcttttttttcagccaactccaattttttttgcgctcctacggaagtcgggaagg

SEQ ID NO: 20 - DNA, 104 bp, synthetic construct
  source 1..104: mol_type = other DNA
gaccataaatatcctgttttagagctaccttcccgacttccgtaggagcgcttttttttcagccaactccaattttttttgcgctcctacggaagtcgggaagg

SEQ ID NO: 21 - DNA, 103 bp, synthetic construct
  source 1..103: mol_type = other DNA
gaactgctaaatatgttttagagctacctgaaggtaaagatcgggtcctcttttttttcagccaactccaattttttttgaggacccgatctttaccttcagg

SEQ ID NO: 22 - DNA, 104 bp, synthetic construct
  source 1..104: mol_type = other DNA
gcaattcctccacacgttttagagctacctgaaggtaaagatcgggtcctcttttttttcagccaactccaattttttttgaggacccgatctttaccttcagg

SEQ ID NO: 23 - DNA, 104 bp, synthetic construct
  source 1..104: mol_type = other DNA
gtcaagtgtcactaagttttagagctacctgaaggtaaagatcgggtcctcttttttttcagccaactccaattttttttgaggacccgatctttaccttcagg

SEQ ID NO: 24 - DNA, 104 bp, synthetic construct
  source 1..104: mol_type = other DNA
gaccataaatatcctgttttagagctacctgaaggtaaagatcgggtcctcttttttttcagccaactccaattttttttgaggacccgatctttaccttcagg

SEQ ID NO: 25 - DNA, 101 bp, synthetic construct
  source 1..101: mol_type = other DNA
gaactgctaaatatgttttagagctacctggttatagcggacgcactgtttttttttcagccaactccaattttttttacagtgcgtccgctataaccagg

SEQ ID NO: 26 - DNA, 102 bp, synthetic construct
  source 1..102: mol_type = other DNA
gcaattcctccacacgttttagagctacctggttatagcggacgcactgtttttttttcagccaactccaattttttttacagtgcgtccgctataaccagg

SEQ ID NO: 27 - DNA, 102 bp, synthetic construct
  source 1..102: mol_type = other DNA
gtcaagtgtcactaagttttagagctacctggttatagcggacgcactgtttttttttcagccaactccaattttttttacagtgcgtccgctataaccagg

SEQ ID NO: 28 - DNA, 102 bp, synthetic construct
  source 1..102: mol_type = other DNA
gaccataaatatcctgttttagagctacctggttatagcggacgcactgtttttttttcagccaactccaattttttttacagtgcgtccgctataaccagg

SEQ ID NO: 29 - DNA, 101 bp, synthetic construct
  source 1..101: mol_type = other DNA
gaactgctaaatatgttttagagctaccgcatcgtattatctgcgaagcttttttttcagccaactccaattttttttgcttcgcagataatacgatgcgg

SEQ ID NO: 30 - DNA, 102 bp, synthetic construct
  source 1..102: mol_type = other DNA
gcaattcctccacacgttttagagctaccgcatcgtattatctgcgaagcttttttttcagccaactccaattttttttgcttcgcagataatacgatgcgg

SEQ ID NO: 31 - DNA, 102 bp, synthetic construct
  source 1..102: mol_type = other DNA
gtcaagtgtcactaagttttagagctaccgcatcgtattatctgcgaagcttttttttcagccaactccaattttttttgcttcgcagataatacgatgcgg

SEQ ID NO: 32 - DNA, 102 bp, synthetic construct
  source 1..102: mol_type = other DNA
gaccataaatatcctgttttagagctaccgcatcgtattatctgcgaagcttttttttcagccaactccaattttttttgcttcgcagataatacgatgcgg

SEQ ID NO: 33 - DNA, 101 bp, synthetic construct
  source 1..101: mol_type = other DNA
gaactgctaaatatgttttagagctaccgctaggacgttcaacggagtcttttttttcagccaactccaattttttttgactccgttgaacgtcctagcgg

SEQ ID NO: 34 - DNA, 102 bp, synthetic construct
  source 1..102: mol_type = other DNA
gcaattcctccacacgttttagagctaccgctaggacgttcaacggagtcttttttttcagccaactccaattttttttgactccgttgaacgtcctagcgg

SEQ ID NO: 35 - DNA, 102 bp, synthetic construct
  source 1..102: mol_type = other DNA
gtcaagtgtcactaagttttagagctaccgctaggacgttcaacggagtcttttttttcagccaactccaattttttttgactccgttgaacgtcctagcgg

SEQ ID NO: 36 - DNA, 102 bp, synthetic construct
  source 1..102: mol_type = other DNA
gaccataaatatcctgttttagagctaccgctaggacgttcaacggagtcttttttttcagccaactccaattttttttgactccgttgaacgtcctagcgg

SEQ ID NO: 37 - DNA, 101 bp, synthetic construct
  source 1..101: mol_type = other DNA
gaactgctaaatatgttttagagctaccatagcggtactatcggcatctttttttttcagccaactccaattttttttagatgccgatagtaccgctatgg

SEQ ID NO: 38 - DNA, 102 bp, synthetic construct
  source 1..102: mol_type = other DNA
gcaattcctccacacgttttagagctaccatagcggtactatcggcatctttttttttcagccaactccaattttttttagatgccgatagtaccgctatgg

SEQ ID NO: 39 - DNA, 102 bp, synthetic construct
  source 1..102: mol_type = other DNA
gtcaagtgtcactaagttttagagctaccatagcggtactatcggcatctttttttttcagccaactccaattttttttagatgccgatagtaccgctatgg

SEQ ID NO: 40 - DNA, 102 bp, synthetic construct
  source 1..102: mol_type = other DNA
gaccataaatatcctgttttagagctaccatagcggtactatcggcatctttttttttcagccaactccaattttttttagatgccgatagtaccgctatgg

SEQ ID NO: 41 - DNA, 101 bp, synthetic construct
  source 1..101: mol_type = other DNA
gaactgctaaatatgttttagagctacctcgtactagtctcgcatgaccttttttttcagccaactccaattttttttggtcatgcgagactagtacgagg

SEQ ID NO: 42 - DNA, 102 bp, synthetic construct
  source 1..102: mol_type = other DNA
gcaattcctccacacgttttagagctacctcgtactagtctcgcatgaccttttttttcagccaactccaattttttttggtcatgcgagactagtacgagg

SEQ ID NO: 43 - DNA, 102 bp, synthetic construct
  source 1..102: mol_type = other DNA
gtcaagtgtcactaagttttagagctacctcgtactagtctcgcatgaccttttttttcagccaactccaattttttttggtcatgcgagactagtacgagg

SEQ ID NO: 44 - DNA, 102 bp, synthetic construct
  source 1..102: mol_type = other DNA
gaccataaatatcctgttttagagctacctcgtactagtctcgcatgaccttttttttcagccaactccaattttttttggtcatgcgagactagtacgagg

SEQ ID NO: 45 - DNA, 101 bp, synthetic construct
  source 1..101: mol_type = other DNA
gaactgctaaatatgttttagagctaccgatagtgctaaacgacgctttttttttttcagccaactccaattttttttaaagcgtcgtttagcactatcgg

SEQ ID NO: 46 - DNA, 102 bp, synthetic construct
  source 1..102: mol_type = other DNA
gcaattcctccacacgttttagagctaccgatagtgctaaacgacgctttttttttttcagccaactccaattttttttaaagcgtcgtttagcactatcgg

SEQ ID NO: 47 - DNA, 102 bp, synthetic construct
  source 1..102: mol_type = other DNA
gtcaagtgtcactaagttttagagctaccgatagtgctaaacgacgctttttttttttcagccaactccaattttttttaaagcgtcgtttagcactatcgg

SEQ ID NO: 48 - DNA, 102 bp, synthetic construct
  source 1..102: mol_type = other DNA
gaccataaatatcctgttttagagctaccgatagtgctaaacgacgctttttttttttcagccaactccaattttttttaaagcgtcgtttagcactatcgg

SEQ ID NO: 49 - DNA, 101 bp, synthetic construct
  source 1..101: mol_type = other DNA
gaactgctaaatatgttttagagctacccgttatcgacgttcaaggaacttttttttcagccaactccaattttttttgttccttgaacgtcgataacggg

SEQ ID NO: 50 - DNA, 102 bp, synthetic construct
  source 1..102: mol_type = other DNA
gcaattcctccacacgttttagagctacccgttatcgacgttcaaggaacttttttttcagccaactccaattttttttgttccttgaacgtcgataacggg

SEQ ID NO: 51 - DNA, 102 bp, synthetic construct
  source 1..102: mol_type = other DNA
gtcaagtgtcactaagttttagagctacccgttatcgacgttcaaggaacttttttttcagccaactccaattttttttgttccttgaacgtcgataacggg

SEQ ID NO: 52 - DNA, 102 bp, synthetic construct
  source 1..102: mol_type = other DNA
gaccataaatatcctgttttagagctacccgttatcgacgttcaaggaacttttttttcagccaactccaattttttttgttccttgaacgtcgataacggg

SEQ ID NO: 53 - DNA, 101 bp, synthetic construct
  source 1..101: mol_type = other DNA
gaactgctaaatatgttttagagctaccgatcaatgcggtctgcgtaacttttttttcagccaactccaattttttttgttacgcagaccgcattgatcgg

SEQ ID NO: 54 - DNA, 102 bp, synthetic construct
  source 1..102: mol_type = other DNA
gcaattcctccacacgttttagagctaccgatcaatgcggtctgcgtaacttttttttcagccaactccaattttttttgttacgcagaccgcattgatcgg

SEQ ID NO: 55 - DNA, 102 bp, synthetic construct
  source 1..102: mol_type = other DNA
gtcaagtgtcactaagttttagagctaccgatcaatgcggtctgcgtaacttttttttcagccaactccaattttttttgttacgcagaccgcattgatcgg

SEQ ID NO: 56 - DNA, 102 bp, synthetic construct
  source 1..102: mol_type = other DNA
gaccataaatatcctgttttagagctaccgatcaatgcggtctgcgtaacttttttttcagccaactccaattttttttgttacgcagaccgcattgatcgg

SEQ ID NO: 57 - DNA, 101 bp, synthetic construct
  source 1..101: mol_type = other DNA
gaactgctaaatatgttttagagctacccttactcgcgatactctcgacttttttttcagccaactccaattttttttgtcgagagtatcgcgagtaaggg

SEQ ID NO: 58 - DNA, 102 bp, synthetic construct
  source 1..102: mol_type = other DNA
gcaattcctccacacgttttagagctacccttactcgcgatactctcgacttttttttcagccaactccaattttttttgtcgagagtatcgcgagtaaggg

SEQ ID NO: 59 - DNA, 102 bp, synthetic construct
  source 1..102: mol_type = other DNA
gtcaagtgtcactaagttttagagctacccttactcgcgatactctcgacttttttttcagccaactccaattttttttgtcgagagtatcgcgagtaaggg

SEQ ID NO: 60 - DNA, 102 bp, synthetic construct
  source 1..102: mol_type = other DNA
gaccataaatatcctgttttagagctacccttactcgcgatactctcgacttttttttcagccaactccaattttttttgtcgagagtatcgcgagtaaggg

SEQ ID NO: 61 - DNA, 101 bp, synthetic construct
  source 1..101: mol_type = other DNA
gaactgctaaatatgttttagagctaccgcggacggtaagcacggaatattttttttcagccaactccaatttttttttattccgtgcttaccgtccgcgg

SEQ ID NO: 62 - DNA, 102 bp, synthetic construct
  source 1..102: mol_type = other DNA
gcaattcctccacacgttttagagctaccgcggacggtaagcacggaatattttttttcagccaactccaatttttttttattccgtgcttaccgtccgcgg

SEQ ID NO: 63 - DNA, 102 bp, synthetic construct
  source 1..102: mol_type = other DNA
gtcaagtgtcactaagttttagagctaccgcggacggtaagcacggaatattttttttcagccaactccaatttttttttattccgtgcttaccgtccgcgg

SEQ ID NO: 64 - DNA, 102 bp, synthetic construct
  source 1..102: mol_type = other DNA
gaccataaatatcctgttttagagctaccgcggacggtaagcacggaatattttttttcagccaactccaatttttttttattccgtgcttaccgtccgcgg

SEQ ID NO: 65 - DNA, 101 bp, synthetic construct
  source 1..101: mol_type = other DNA
gaactgctaaatatgttttagagctacctatagtcacgaatcgtagggtttttttttcagccaactccaattttttttaccctacgattcgtgactatagg

SEQ ID NO: 66 - DNA, 102 bp, synthetic construct
  source 1..102: mol_type = other DNA
gcaattcctccacacgttttagagctacctatagtcacgaatcgtagggtttttttttcagccaactccaattttttttaccctacgattcgtgactatagg

SEQ ID NO: 67 - DNA, 102 bp, synthetic construct
  source 1..102: mol_type = other DNA
gtcaagtgtcactaagttttagagctacctatagtcacgaatcgtagggtttttttttcagccaactccaattttttttaccctacgattcgtgactatagg

SEQ ID NO: 68 - DNA, 102 bp, synthetic construct
  source 1..102: mol_type = other DNA
gaccataaatatcctgttttagagctacctatagtcacgaatcgtagggtttttttttcagccaactccaattttttttaccctacgattcgtgactatagg

SEQ ID NO: 69 - DNA, 101 bp, synthetic construct
  source 1..101: mol_type = other DNA
gaactgctaaatatgttttagagctacccgtcgtcacgtatgcgtagcattttttttcagccaactccaatttttttttgctacgcatacgtgacgacggg

SEQ ID NO: 70 - DNA, 102 bp, synthetic construct
  source 1..102: mol_type = other DNA
gcaattcctccacacgttttagagctacccgtcgtcacgtatgcgtagcattttttttcagccaactccaatttttttttgctacgcatacgtgacgacggg

SEQ ID NO: 71 - DNA, 102 bp, synthetic construct
  source 1..102: mol_type = other DNA
gtcaagtgtcactaagttttagagctacccgtcgtcacgtatgcgtagcattttttttcagccaactccaatttttttttgctacgcatacgtgacgacggg

SEQ ID NO: 72 - DNA, 102 bp, synthetic construct
  source 1..102: mol_type = other DNA
gaccataaatatcctgttttagagctacccgtcgtcacgtatgcgtagcattttttttcagccaactccaatttttttttgctacgcatacgtgacgacggg

SEQ ID NO: 73 - DNA, 101 bp, synthetic construct
  source 1..101: mol_type = other DNA
gaactgctaaatatgttttagagctacccgagaggtagtagacgacgcattttttttcagccaactccaatttttttttgcgtcgtctactacctctcggg

SEQ ID NO: 74 - DNA, 102 bp, synthetic construct
  source 1..102: mol_type = other DNA
gcaattcctccacacgttttagagctacccgagaggtagtagacgacgcattttttttcagccaactccaatttttttttgcgtcgtctactacctctcggg

SEQ ID NO: 75 - DNA, 102 bp, synthetic construct
  source 1..102: mol_type = other DNA
gtcaagtgtcactaagttttagagctacccgagaggtagtagacgacgcattttttttcagccaactccaatttttttttgcgtcgtctactacctctcggg

SEQ ID NO: 76 - DNA, 102 bp, synthetic construct
  source 1..102: mol_type = other DNA
gaccataaatatcctgttttagagctacccgagaggtagtagacgacgcattttttttcagccaactccaatttttttttgcgtcgtctactacctctcggg

SEQ ID NO: 77 - DNA, 101 bp, synthetic construct
  source 1..101: mol_type = other DNA
gaactgctaaatatgttttagagctaccgacgtctacggacgggagctattttttttcagccaactccaatttttttttagctcccgtccgtagacgtcgg

SEQ ID NO: 78 - DNA, 102 bp, synthetic construct
  source 1..102: mol_type = other DNA
gcaattcctccacacgttttagagctaccgacgtctacggacgggagctattttttttcagccaactccaatttttttttagctcccgtccgtagacgtcgg

SEQ ID NO: 79 - DNA, 102 bp, synthetic construct
  source 1..102: mol_type = other DNA
gtcaagtgtcactaagttttagagctaccgacgtctacggacgggagctattttttttcagccaactccaatttttttttagctcccgtccgtagacgtcgg

SEQ ID NO: 80 - DNA, 102 bp, synthetic construct
  source 1..102: mol_type = other DNA
gaccataaatatcctgttttagagctaccgacgtctacggacgggagctattttttttcagccaactccaatttttttttagctcccgtccgtagacgtcgg

SEQ ID NO: 81 - DNA, 101 bp, synthetic construct
  source 1..101: mol_type = other DNA
gaactgctaaatatgttttagagctaccaaagctcattcgcgactgagcttttttttcagccaactccaattttttttgctcagtcgcgaatgagctttgg

SEQ ID NO: 82 - DNA, 102 bp, synthetic construct
  source 1..102: mol_type = other DNA
gcaattcctccacacgttttagagctaccaaagctcattcgcgactgagcttttttttcagccaactccaattttttttgctcagtcgcgaatgagctttgg

SEQ ID NO: 83 - DNA, 102 bp, synthetic construct
  source 1..102: mol_type = other DNA
gtcaagtgtcactaagttttagagctaccaaagctcattcgcgactgagcttttttttcagccaactccaattttttttgctcagtcgcgaatgagctttgg

SEQ ID NO: 84 - DNA, 102 bp, synthetic construct
  source 1..102: mol_type = other DNA
gaccataaatatcctgttttagagctaccaaagctcattcgcgactgagcttttttttcagccaactccaattttttttgctcagtcgcgaatgagctttgg

SEQ ID NO: 85 - DNA, 101 bp, synthetic construct
  source 1..101: mol_type = other DNA
gaactgctaaatatgttttagagctaccatggcacgatcgacacggaggttttttttcagccaactccaattttttttcctccgtgtcgatcgtgccatgg

SEQ ID NO: 86 - DNA, 102 bp, synthetic construct
  source 1..102: mol_type = other DNA
gcaattcctccacacgttttagagctaccatggcacgatcgacacggaggttttttttcagccaactccaattttttttcctccgtgtcgatcgtgccatgg

SEQ ID NO: 87 - DNA, 102 bp, synthetic construct
  source 1..102: mol_type = other DNA
gtcaagtgtcactaagttttagagctaccatggcacgatcgacacggaggttttttttcagccaactccaattttttttcctccgtgtcgatcgtgccatgg

SEQ ID NO: 88 - DNA, 102 bp, synthetic construct
  source 1..102: mol_type = other DNA
gaccataaatatcctgttttagagctaccatggcacgatcgacacggaggttttttttcagccaactccaattttttttcctccgtgtcgatcgtgccatgg

SEQ ID NO: 89 - DNA, 101 bp, synthetic construct
  source 1..101: mol_type = other DNA
gaactgctaaatatgttttagagctacccgaactctctatcgaacgagtttttttttcagccaactccaattttttttactcgttcgatagagagttcggg

SEQ ID NO: 90 - DNA, 102 bp, synthetic construct
  source 1..102: mol_type = other DNA
gcaattcctccacacgttttagagctacccgaactctctatcgaacgagtttttttttcagccaactccaattttttttactcgttcgatagagagttcggg

SEQ ID NO: 91 - DNA, 102 bp, synthetic construct
  source 1..102: mol_type = other DNA
gtcaagtgtcactaagttttagagctacccgaactctctatcgaacgagtttttttttcagccaactccaattttttttactcgttcgatagagagttcggg

SEQ ID NO: 92 - DNA, 102 bp, synthetic construct
  source 1..102: mol_type = other DNA
gaccataaatatcctgttttagagctacccgaactctctatcgaacgagtttttttttcagccaactccaattttttttactcgttcgatagagagttcggg

SEQ ID NO: 93 - DNA, 104 bp, synthetic construct
  source 1..104: mol_type = other DNA
gcgagccgtaccagagttttagagctaccgtcgttgtaccgtctacttgacttttttttcagccaactccaattttttttgtcaagtagacggtacaacgacgg

SEQ ID NO: 94 - DNA, 104 bp, synthetic construct
  source 1..104: mol_type = other DNA
gccaaggcttaaggggttttagagctaccgtcgttgtaccgtctacttgacttttttttcagccaactccaattttttttgtcaagtagacggtacaacgacgg

SEQ ID NO: 95 - DNA, 103 bp, synthetic construct
  source 1..103: mol_type = other DNA
gccgactggaagaagttttagagctaccgtcgttgtaccgtctacttgacttttttttcagccaactccaattttttttgtcaagtagacggtacaacgacgg

SEQ ID NO: 96 - DNA, 104 bp, synthetic construct
  source 1..104: mol_type = other DNA
gctgcaaacagtgatgttttagagctaccgtcgttgtaccgtctacttgacttttttttcagccaactccaattttttttgtcaagtagacggtacaacgacgg

SEQ ID NO: 97 - DNA, 102 bp, synthetic construct
  source 1..102: mol_type = other DNA
gcgagccgtaccagagttttagagctacctacactcgacatcggtagctattttttttcagccaactccaatttttttttagctaccgatgtcgagtgtagg

SEQ ID NO: 98 - DNA, 102 bp, synthetic construct
  source 1..102: mol_type = other DNA
gccaaggcttaaggggttttagagctacctacactcgacatcggtagctattttttttcagccaactccaatttttttttagctaccgatgtcgagtgtagg

SEQ ID NO: 99 - DNA, 101 bp, synthetic construct
  source 1..101: mol_type = other DNA
gccgactggaagaagttttagagctacctacactcgacatcggtagctattttttttcagccaactccaatttttttttagctaccgatgtcgagtgtagg

SEQ ID NO: 100 - DNA, 102 bp, synthetic construct
  source 1..102: mol_type = other DNA
gctgcaaacagtgatgttttagagctacctacactcgacatcggtagctattttttttcagccaactccaatttttttttagctaccgatgtcgagtgtagg

SEQ ID NO: 101 - DNA, 102 bp, synthetic construct
  source 1..102: mol_type = other DNA
gcgagccgtaccagagttttagagctaccctggcggaacgttcgagtaatttttttttcagccaactccaattttttttattactcgaacgttccgccaggg

SEQ ID NO: 102 - DNA, 102 bp, synthetic construct
  source 1..102: mol_type = other DNA
gccaaggcttaaggggttttagagctaccctggcggaacgttcgagtaatttttttttcagccaactccaattttttttattactcgaacgttccgccaggg

SEQ ID NO: 103 - DNA, 101 bp, synthetic construct
  source 1..101: mol_type = other DNA
gccgactggaagaagttttagagctaccctggcggaacgttcgagtaatttttttttcagccaactccaattttttttattactcgaacgttccgccaggg

SEQ ID NO: 104 - DNA, 102 bp, synthetic construct
  source 1..102: mol_type = other DNA
gctgcaaacagtgatgttttagagctaccctggcggaacgttcgagtaatttttttttcagccaactccaattttttttattactcgaacgttccgccaggg

SEQ ID NO: 105 - DNA, 102 bp, synthetic construct
  source 1..102: mol_type = other DNA
gcgagccgtaccagagttttagagctacctacacgatagtggtcgtgcgcttttttttcagccaactccaattttttttgcgcacgaccactatcgtgtagg

SEQ ID NO: 106 - DNA, 102 bp, synthetic construct
  source 1..102: mol_type = other DNA
gccaaggcttaaggggttttagagctacctacacgatagtggtcgtgcgcttttttttcagccaactccaattttttttgcgcacgaccactatcgtgtagg

SEQ ID NO: 107 - DNA, 101 bp, synthetic construct
  source 1..101: mol_type = other DNA
gccgactggaagaagttttagagctacctacacgatagtggtcgtgcgcttttttttcagccaactccaattttttttgcgcacgaccactatcgtgtagg

SEQ ID NO: 108 - DNA, 102 bp, synthetic construct
  source 1..102: mol_type = other DNA
gctgcaaacagtgatgttttagagctacctacacgatagtggtcgtgcgcttttttttcagccaactccaattttttttgcgcacgaccactatcgtgtagg

SEQ ID NO: 109 - DNA, 104 bp, synthetic construct
  source 1..104: mol_type = other DNA
gcgagccgtaccagagttttagagctaccttcccgacttccgtaggagcgcttttttttcagccaactccaattttttttgcgctcctacggaagtcgggaagg

SEQ ID NO: 110 - DNA, 104 bp, synthetic construct
  source 1..104: mol_type = other DNA
gccaaggcttaaggggttttagagctaccttcccgacttccgtaggagcgcttttttttcagccaactccaattttttttgcgctcctacggaagtcgggaagg

SEQ ID NO: 111 - DNA, 103 bp, synthetic construct
  source 1..103: mol_type = other DNA
gccgactggaagaagttttagagctaccttcccgacttccgtaggagcgcttttttttcagccaactccaattttttttgcgctcctacggaagtcgggaagg

SEQ ID NO: 112 - DNA, 104 bp, synthetic construct
  source 1..104: mol_type = other DNA
gctgcaaacagtgatgttttagagctaccttcccgacttccgtaggagcgcttttttttcagccaactccaattttttttgcgctcctacggaagtcgggaagg

SEQ ID NO: 113 - DNA, 104 bp, synthetic construct
  source 1..104: mol_type = other DNA
gcgagccgtaccagagttttagagctacctgaaggtaaagatcgggtcctcttttttttcagccaactccaattttttttgaggacccgatctttaccttcagg

SEQ ID NO: 114 - DNA, 104 bp, synthetic construct
  source 1..104: mol_type = other DNA
gccaaggcttaaggggttttagagctacctgaaggtaaagatcgggtcctcttttttttcagccaactccaattttttttgaggacccgatctttaccttcagg

SEQ ID NO: 115 - DNA, 103 bp, synthetic construct
  source 1..103: mol_type = other DNA
gccgactggaagaagttttagagctacctgaaggtaaagatcgggtcctcttttttttcagccaactccaattttttttgaggacccgatctttaccttcagg

SEQ ID NO: 116 - DNA, 104 bp, synthetic construct
  source 1..104: mol_type = other DNA
gctgcaaacagtgatgttttagagctacctgaaggtaaagatcgggtcctcttttttttcagccaactccaattttttttgaggacccgatctttaccttcagg

SEQ ID NO: 117 - DNA, 102 bp, synthetic construct
  source 1..102: mol_type = other DNA
gcgagccgtaccagagttttagagctacctggttatagcggacgcactgtttttttttcagccaactccaattttttttacagtgcgtccgctataaccagg

SEQ ID NO: 118 - DNA, 102 bp, synthetic construct
  source 1..102: mol_type = other DNA
gccaaggcttaaggggttttagagctacctggttatagcggacgcactgtttttttttcagccaactccaattttttttacagtgcgtccgctataaccagg

SEQ ID NO: 119 - DNA, 101 bp, synthetic construct
  source 1..101: mol_type = other DNA
gccgactggaagaagttttagagctacctggttatagcggacgcactgtttttttttcagccaactccaattttttttacagtgcgtccgctataaccagg

SEQ ID NO: 120 - DNA, 102 bp, synthetic construct
  source 1..102: mol_type = other DNA
gctgcaaacagtgatgttttagagctacctggttatagcggacgcactgtttttttttcagccaactccaattttttttacagtgcgtccgctataaccagg

SEQ ID NO: 121 - DNA, 102 bp, synthetic construct
  source 1..102: mol_type = other DNA
gcgagccgtaccagagttttagagctaccgcatcgtattatctgcgaagcttttttttcagccaactccaattttttttgcttcgcagataatacgatgcgg

SEQ ID NO: 122 - DNA, 102 bp, synthetic construct
  source 1..102: mol_type = other DNA
gccaaggcttaaggggttttagagctaccgcatcgtattatctgcgaagcttttttttcagccaactccaattttttttgcttcgcagataatacgatgcgg

SEQ ID NO: 123 - DNA, 101 bp, synthetic construct
  source 1..101: mol_type = other DNA
gccgactggaagaagttttagagctaccgcatcgtattatctgcgaagcttttttttcagccaactccaattttttttgcttcgcagataatacgatgcgg

SEQ ID NO: 124 - DNA, 102 bp, synthetic construct
  source 1..102: mol_type = other DNA
gctgcaaacagtgatgttttagagctaccgcatcgtattatctgcgaagcttttttttcagccaactccaattttttttgcttcgcagataatacgatgcgg

SEQ ID NO: 125 - DNA, 102 bp, synthetic construct
  source 1..102: mol_type = other DNA
gcgagccgtaccagagttttagagctaccgctaggacgttcaacggagtcttttttttcagccaactccaattttttttgactccgttgaacgtcctagcgg

SEQ ID NO: 126 - DNA, 102 bp, synthetic construct
  source 1..102: mol_type = other DNA
gccaaggcttaaggggttttagagctaccgctaggacgttcaacggagtcttttttttcagccaactccaattttttttgactccgttgaacgtcctagcgg

SEQ ID NO: 127 - DNA, 101 bp, synthetic construct
  source 1..101: mol_type = other DNA
gccgactggaagaagttttagagctaccgctaggacgttcaacggagtcttttttttcagccaactccaattttttttgactccgttgaacgtcctagcgg

SEQ ID NO: 128 - DNA, 102 bp, synthetic construct
  source 1..102: mol_type = other DNA
gctgcaaacagtgatgttttagagctaccgctaggacgttcaacggagtcttttttttcagccaactccaattttttttgactccgttgaacgtcctagcgg

SEQ ID NO: 129 - DNA, 102 bp, synthetic construct
  source 1..102: mol_type = other DNA
gcgagccgtaccagagttttagagctaccatagcggtactatcggcatctttttttttcagccaactccaattttttttagatgccgatagtaccgctatgg

SEQ ID NO: 130 - DNA, 102 bp, synthetic construct
  source 1..102: mol_type = other DNA
gccaaggcttaaggggttttagagctaccatagcggtactatcggcatctttttttttcagccaactccaattttttttagatgccgatagtaccgctatgg

SEQ ID NO: 131 - DNA, 101 bp, synthetic construct
  source 1..101: mol_type = other DNA
gccgactggaagaagttttagagctaccatagcggtactatcggcatctttttttttcagccaactccaattttttttagatgccgatagtaccgctatgg

SEQ ID NO: 132 - DNA, 102 bp, synthetic construct
  source 1..102: mol_type = other DNA
gctgcaaacagtgatgttttagagctaccatagcggtactatcggcatctttttttttcagccaactccaattttttttagatgccgatagtaccgctatgg

SEQ ID NO: 133 - DNA, 102 bp, synthetic construct
  source 1..102: mol_type = other DNA
gcgagccgtaccagagttttagagctacctcgtactagtctcgcatgaccttttttttcagccaactccaattttttttggtcatgcgagactagtacgagg

SEQ ID NO: 134 - DNA, 102 bp, synthetic construct
  source 1..102: mol_type = other DNA
gccaaggcttaaggggttttagagctacctcgtactagtctcgcatgaccttttttttcagccaactccaattttttttggtcatgcgagactagtacgagg

SEQ ID NO: 135 - DNA, 101 bp, synthetic construct
  source 1..101: mol_type = other DNA
gccgactggaagaagttttagagctacctcgtactagtctcgcatgaccttttttttcagccaactccaattttttttggtcatgcgagactagtacgagg

SEQ ID NO: 136 - DNA, 102 bp, synthetic construct
  source 1..102: mol_type = other DNA
gctgcaaacagtgatgttttagagctacctcgtactagtctcgcatgaccttttttttcagccaactccaattttttttggtcatgcgagactagtacgagg

SEQ ID NO: 137 - DNA, 102 bp, synthetic construct
  source 1..102: mol_type = other DNA
gcgagccgtaccagagttttagagctaccgatagtgctaaacgacgctttttttttttcagccaactccaattttttttaaagcgtcgtttagcactatcgg

SEQ ID NO: 138 - DNA, 102 bp, synthetic construct
  source 1..102: mol_type = other DNA
gccaaggcttaaggggttttagagctaccgatagtgctaaacgacgctttttttttttcagccaactccaattttttttaaagcgtcgtttagcactatcgg

SEQ ID NO: 139 - DNA, 101 bp, synthetic construct
  source 1..101: mol_type = other DNA
gccgactggaagaagttttagagctaccgatagtgctaaacgacgctttttttttttcagccaactccaattttttttaaagcgtcgtttagcactatcgg

SEQ ID NO: 140 - DNA, 102 bp, synthetic construct
  source 1..102: mol_type = other DNA
gctgcaaacagtgatgttttagagctaccgatagtgctaaacgacgctttttttttttcagccaactccaattttttttaaagcgtcgtttagcactatcgg

SEQ ID NO: 141 - DNA, 102 bp, synthetic construct
  source 1..102: mol_type = other DNA
gcgagccgtaccagagttttagagctacccgttatcgacgttcaaggaacttttttttcagccaactccaattttttttgttccttgaacgtcgataacggg

SEQ ID NO: 142 - DNA, 102 bp, synthetic construct
  source 1..102: mol_type = other DNA
gccaaggcttaaggggttttagagctacccgttatcgacgttcaaggaacttttttttcagccaactccaattttttttgttccttgaacgtcgataacggg

SEQ ID NO: 143 - DNA, 101 bp, synthetic construct
  source 1..101: mol_type = other DNA
gccgactggaagaagttttagagctacccgttatcgacgttcaaggaacttttttttcagccaactccaattttttttgttccttgaacgtcgataacggg

SEQ ID NO: 144 - DNA, 102 bp, synthetic construct
  source 1..102: mol_type = other DNA
gctgcaaacagtgatgttttagagctacccgttatcgacgttcaaggaacttttttttcagccaactccaattttttttgttccttgaacgtcgataacggg

SEQ ID NO: 145 - DNA, 102 bp, synthetic construct
  source 1..102: mol_type = other DNA
gcgagccgtaccagagttttagagctaccgatcaatgcggtctgcgtaacttttttttcagccaactccaattttttttgttacgcagaccgcattgatcgg

SEQ ID NO: 146 - DNA, 102 bp, synthetic construct
  source 1..102: mol_type = other DNA
gccaaggcttaaggggttttagagctaccgatcaatgcggtctgcgtaacttttttttcagccaactccaattttttttgttacgcagaccgcattgatcgg

SEQ ID NO: 147 - DNA, 101 bp, synthetic construct
  source 1..101: mol_type = other DNA
gccgactggaagaagttttagagctaccgatcaatgcggtctgcgtaacttttttttcagccaactccaattttttttgttacgcagaccgcattgatcgg

SEQ ID NO: 148 - DNA, 102 bp, synthetic construct
  source 1..102: mol_type = other DNA
gctgcaaacagtgatgttttagagctaccgatcaatgcggtctgcgtaacttttttttcagccaactccaattttttttgttacgcagaccgcattgatcgg

SEQ ID NO: 149 - DNA, 102 bp, synthetic construct
  source 1..102: mol_type = other DNA
gcgagccgtaccagagttttagagctacccttactcgcgatactctcgacttttttttcagccaactccaattttttttgtcgagagtatcgcgagtaaggg

SEQ ID NO: 150 - DNA, 102 bp, synthetic construct
  source 1..102: mol_type = other DNA
gccaaggcttaaggggttttagagctacccttactcgcgatactctcgacttttttttcagccaactccaattttttttgtcgagagtatcgcgagtaaggg

SEQ ID NO: 151 - DNA, 101 bp, synthetic construct
  source 1..101: mol_type = other DNA
gccgactggaagaagttttagagctacccttactcgcgatactctcgacttttttttcagccaactccaattttttttgtcgagagtatcgcgagtaaggg

SEQ ID NO: 152 - DNA, 102 bp, synthetic construct
  source 1..102: mol_type = other DNA
gctgcaaacagtgatgttttagagctacccttactcgcgatactctcgacttttttttcagccaactccaattttttttgtcgagagtatcgcgagtaaggg

SEQ ID NO: 153 - DNA, 102 bp, synthetic construct
  source 1..102: mol_type = other DNA
gcgagccgtaccagagttttagagctaccgcggacggtaagcacggaatattttttttcagccaactccaatttttttttattccgtgcttaccgtccgcgg

SEQ ID NO: 154 - DNA, 102 bp, synthetic construct
  source 1..102: mol_type = other DNA
gccaaggcttaaggggttttagagctaccgcggacggtaagcacggaatattttttttcagccaactccaatttttttttattccgtgcttaccgtccgcgg

SEQ ID NO: 155 - DNA, 101 bp, synthetic construct
  source 1..101: mol_type = other DNA
gccgactggaagaagttttagagctaccgcggacggtaagcacggaatattttttttcagccaactccaatttttttttattccgtgcttaccgtccgcgg

SEQ ID NO: 156 - DNA, 102 bp, synthetic construct
  source 1..102: mol_type = other DNA
gctgcaaacagtgatgttttagagctaccgcggacggtaagcacggaatattttttttcagccaactccaatttttttttattccgtgcttaccgtccgcgg

SEQ ID NO: 157 - DNA, 102 bp, synthetic construct
  source 1..102: mol_type = other DNA
gcgagccgtaccagagttttagagctacctatagtcacgaatcgtagggtttttttttcagccaactccaattttttttaccctacgattcgtgactatagg

SEQ ID NO: 158 - DNA, 102 bp, synthetic construct
  source 1..102: mol_type = other DNA
gccaaggcttaaggggttttagagctacctatagtcacgaatcgtagggtttttttttcagccaactccaattttttttaccctacgattcgtgactatagg

SEQ ID NO: 159 - DNA, 101 bp, synthetic construct
  source 1..101: mol_type = other DNA
gccgactggaagaagttttagagctacctatagtcacgaatcgtagggtttttttttcagccaactccaattttttttaccctacgattcgtgactatagg

SEQ ID NO: 160 - DNA, 102 bp, synthetic construct
  source 1..102: mol_type = other DNA
gctgcaaacagtgatgttttagagctacctatagtcacgaatcgtagggtttttttttcagccaactccaattttttttaccctacgattcgtgactatagg

SEQ ID NO: 161 - DNA, 102 bp, synthetic construct
  source 1..102: mol_type = other DNA
gcgagccgtaccagagttttagagctacccgtcgtcacgtatgcgtagcattttttttcagccaactccaatttttttttgctacgcatacgtgacgacggg

SEQ ID NO: 162 - DNA, 102 bp, synthetic construct
  source 1..102: mol_type = other DNA
gccaaggcttaaggggttttagagctacccgtcgtcacgtatgcgtagcattttttttcagccaactccaatttttttttgctacgcatacgtgacgacggg

SEQ ID NO: 163 - DNA, 101 bp, synthetic construct
  source 1..101: mol_type = other DNA
gccgactggaagaagttttagagctacccgtcgtcacgtatgcgtagcattttttttcagccaactccaatttttttttgctacgcatacgtgacgacggg

SEQ ID NO: 164 - DNA, 102 bp, synthetic construct
  source 1..102: mol_type = other DNA
gctgcaaacagtgatgttttagagctacccgtcgtcacgtatgcgtagcattttttttcagccaactccaatttttttttgctacgcatacgtgacgacggg

SEQ ID NO: 165 - DNA, 102 bp, synthetic construct
  source 1..102: mol_type = other DNA
gcgagccgtaccagagttttagagctacccgagaggtagtagacgacgcattttttttcagccaactccaatttttttttgcgtcgtctactacctctcggg

SEQ ID NO: 166 - DNA, 102 bp, synthetic construct
  source 1..102: mol_type = other DNA
gccaaggcttaaggggttttagagctacccgagaggtagtagacgacgcattttttttcagccaactccaatttttttttgcgtcgtctactacctctcggg

SEQ ID NO: 167 - DNA, 101 bp, synthetic construct
  source 1..101: mol_type = other DNA
gccgactggaagaagttttagagctacccgagaggtagtagacgacgcattttttttcagccaactccaatttttttttgcgtcgtctactacctctcggg

SEQ ID NO: 168 - DNA, 102 bp, synthetic construct
  source 1..102: mol_type = other DNA
gctgcaaacagtgatgttttagagctacccgagaggtagtagacgacgcattttttttcagccaactccaatttttttttgcgtcgtctactacctctcggg

SEQ ID NO: 169 - DNA, 102 bp, synthetic construct
  source 1..102: mol_type = other DNA
gcgagccgtaccagagttttagagctaccgacgtctacggacgggagctattttttttcagccaactccaatttttttttagctcccgtccgtagacgtcgg

SEQ ID NO: 170 - DNA, 102 bp, synthetic construct
  source 1..102: mol_type = other DNA
gccaaggcttaaggggttttagagctaccgacgtctacggacgggagctattttttttcagccaactccaatttttttttagctcccgtccgtagacgtcgg

SEQ ID NO: 171 - DNA, 101 bp, synthetic construct
  source 1..101: mol_type = other DNA
gccgactggaagaagttttagagctaccgacgtctacggacgggagctattttttttcagccaactccaatttttttttagctcccgtccgtagacgtcgg

SEQ ID NO: 172 - DNA, 102 bp, synthetic construct
  source 1..102: mol_type = other DNA
gctgcaaacagtgatgttttagagctaccgacgtctacggacgggagctattttttttcagccaactccaatttttttttagctcccgtccgtagacgtcgg

SEQ ID NO: 173 - DNA, 102 bp, synthetic construct
  source 1..102: mol_type = other DNA
gcgagccgtaccagagttttagagctaccaaagctcattcgcgactgagcttttttttcagccaactccaattttttttgctcagtcgcgaatgagctttgg

SEQ ID NO: 174 - DNA, 102 bp, synthetic construct
  source 1..102: mol_type = other DNA
gccaaggcttaaggggttttagagctaccaaagctcattcgcgactgagcttttttttcagccaactccaattttttttgctcagtcgcgaatgagctttgg

SEQ ID NO: 175 - DNA, 101 bp, synthetic construct
  source 1..101: mol_type = other DNA
gccgactggaagaagttttagagctaccaaagctcattcgcgactgagcttttttttcagccaactccaattttttttgctcagtcgcgaatgagctttgg

SEQ ID NO: 176 - DNA, 102 bp, synthetic construct
  source 1..102: mol_type = other DNA
gctgcaaacagtgatgttttagagctaccaaagctcattcgcgactgagcttttttttcagccaactccaattttttttgctcagtcgcgaatgagctttgg

SEQ ID NO: 177 - DNA, 102 bp, synthetic construct
  source 1..102: mol_type = other DNA
gcgagccgtaccagagttttagagctaccatggcacgatcgacacggaggttttttttcagccaactccaattttttttcctccgtgtcgatcgtgccatgg

SEQ ID NO: 178 - DNA, 102 bp, synthetic construct
  source 1..102: mol_type = other DNA
gccaaggcttaaggggttttagagctaccatggcacgatcgacacggaggttttttttcagccaactccaattttttttcctccgtgtcgatcgtgccatgg

SEQ ID NO: 179 - DNA, 101 bp, synthetic construct
  source 1..101: mol_type = other DNA
gccgactggaagaagttttagagctaccatggcacgatcgacacggaggttttttttcagccaactccaattttttttcctccgtgtcgatcgtgccatgg

SEQ ID NO: 180 - DNA, 102 bp, synthetic construct
  source 1..102: mol_type = other DNA
gctgcaaacagtgatgttttagagctaccatggcacgatcgacacggaggttttttttcagccaactccaattttttttcctccgtgtcgatcgtgccatgg

SEQ ID NO: 181 - DNA, 102 bp, synthetic construct
  source 1..102: mol_type = other DNA
gcgagccgtaccagagttttagagctacccgaactctctatcgaacgagtttttttttcagccaactccaattttttttactcgttcgatagagagttcggg

SEQ ID NO: 182 - DNA, 102 bp, synthetic construct
  source 1..102: mol_type = other DNA
gccaaggcttaaggggttttagagctacccgaactctctatcgaacgagtttttttttcagccaactccaattttttttactcgttcgatagagagttcggg

SEQ ID NO: 183 - DNA, 101 bp, synthetic construct
  source 1..101: mol_type = other DNA
gccgactggaagaagttttagagctacccgaactctctatcgaacgagtttttttttcagccaactccaattttttttactcgttcgatagagagttcggg

SEQ ID NO: 184 - DNA, 102 bp, synthetic construct
  source 1..102: mol_type = other DNA
gctgcaaacagtgatgttttagagctacccgaactctctatcgaacgagtttttttttcagccaactccaattttttttactcgttcgatagagagttcggg

SEQ ID NO: 185 - DNA, 104 bp, synthetic construct
  source 1..104: mol_type = other DNA
gcggtagttggaagtgttttagagctaccgtcgttgtaccgtctacttgacttttttttcagccaactccaattttttttgtcaagtagacggtacaacgacgg

SEQ ID NO: 186 - DNA, 104 bp, synthetic construct
  source 1..104: mol_type = other DNA
gcagcgccccgcggtgttttagagctaccgtcgttgtaccgtctacttgacttttttttcagccaactccaattttttttgtcaagtagacggtacaacgacgg

SEQ ID NO: 187 - DNA, 104 bp, synthetic construct
  source 1..104: mol_type = other DNA
gcgcagtgacgtggggttttagagctaccgtcgttgtaccgtctacttgacttttttttcagccaactccaattttttttgtcaagtagacggtacaacgacgg

SEQ ID NO: 188 - DNA, 104 bp, synthetic construct
  source 1..104: mol_type = other DNA
gctgccccgggtctggttttagagctaccgtcgttgtaccgtctacttgacttttttttcagccaactccaattttttttgtcaagtagacggtacaacgacgg

SEQ ID NO: 189 - DNA, 102 bp, synthetic construct
  source 1..102: mol_type = other DNA
gcggtagttggaagtgttttagagctacctacactcgacatcggtagctattttttttcagccaactccaatttttttttagctaccgatgtcgagtgtagg

SEQ ID NO: 190 - DNA, 102 bp, synthetic construct
  source 1..102: mol_type = other DNA
gcagcgccccgcggtgttttagagctacctacactcgacatcggtagctattttttttcagccaactccaatttttttttagctaccgatgtcgagtgtagg

SEQ ID NO: 191 - DNA, 102 bp, synthetic construct
  source 1..102: mol_type = other DNA
gcgcagtgacgtggggttttagagctacctacactcgacatcggtagctattttttttcagccaactccaatttttttttagctaccgatgtcgagtgtagg

SEQ ID NO: 192 - DNA, 102 bp, synthetic construct
  source 1..102: mol_type = other DNA
gctgccccgggtctggttttagagctacctacactcgacatcggtagctattttttttcagccaactccaatttttttttagctaccgatgtcgagtgtagg

SEQ ID NO: 193 - DNA, 102 bp, synthetic construct
  source 1..102: mol_type = other DNA
gcggtagttggaagtgttttagagctaccctggcggaacgttcgagtaatttttttttcagccaactccaattttttttattactcgaacgttccgccaggg

SEQ ID NO: 194 - DNA, 102 bp, synthetic construct
  source 1..102: mol_type = other DNA
gcagcgccccgcggtgttttagagctaccctggcggaacgttcgagtaatttttttttcagccaactccaattttttttattactcgaacgttccgccaggg

SEQ ID NO: 195 - DNA, 102 bp, synthetic construct
  source 1..102: mol_type = other DNA
gcgcagtgacgtggggttttagagctaccctggcggaacgttcgagtaatttttttttcagccaactccaattttttttattactcgaacgttccgccaggg

SEQ ID NO: 196 - DNA, 102 bp, synthetic construct
  source 1..102: mol_type = other DNA
gctgccccgggtctggttttagagctaccctggcggaacgttcgagtaatttttttttcagccaactccaattttttttattactcgaacgttccgccaggg

SEQ ID NO: 197 - DNA, 102 bp, synthetic construct
  source 1..102: mol_type = other DNA
gcggtagttggaagtgttttagagctacctacacgatagtggtcgtgcgcttttttttcagccaactccaattttttttgcgcacgaccactatcgtgtagg

SEQ ID NO: 198 - DNA, 102 bp, synthetic construct
  source 1..102: mol_type = other DNA
gcagcgccccgcggtgttttagagctacctacacgatagtggtcgtgcgcttttttttcagccaactccaattttttttgcgcacgaccactatcgtgtagg

SEQ ID NO: 199 - DNA, 102 bp, synthetic construct
  source 1..102: mol_type = other DNA
gcgcagtgacgtggggttttagagctacctacacgatagtggtcgtgcgcttttttttcagccaactccaattttttttgcgcacgaccactatcgtgtagg

SEQ ID NO: 200 - DNA, 102 bp, synthetic construct
  source 1..102: mol_type = other DNA
gctgccccgggtctggttttagagctacctacacgatagtggtcgtgcgcttttttttcagccaactccaattttttttgcgcacgaccactatcgtgtagg

SEQ ID NO: 201 - DNA, 104 bp, synthetic construct
  source 1..104: mol_type = other DNA
gcggtagttggaagtgttttagagctaccttcccgacttccgtaggagcgcttttttttcagccaactccaattttttttgcgctcctacggaagtcgggaagg

SEQ ID NO: 202 - DNA, 104 bp, synthetic construct
  source 1..104: mol_type = other DNA
gcagcgccccgcggtgttttagagctaccttcccgacttccgtaggagcgcttttttttcagccaactccaattttttttgcgctcctacggaagtcgggaagg

SEQ ID NO: 203 - DNA, 104 bp, synthetic construct
  source 1..104: mol_type = other DNA
gcgcagtgacgtggggttttagagctaccttcccgacttccgtaggagcgcttttttttcagccaactccaattttttttgcgctcctacggaagtcgggaagg

SEQ ID NO: 204 - DNA, 104 bp, synthetic construct
  source 1..104: mol_type = other DNA
gctgccccgggtctggttttagagctaccttcccgacttccgtaggagcgcttttttttcagccaactccaattttttttgcgctcctacggaagtcgggaagg

SEQ ID NO: 205 - DNA, 104 bp, synthetic construct
  source 1..104: mol_type = other DNA
gcggtagttggaagtgttttagagctacctgaaggtaaagatcgggtcctcttttttttcagccaactccaattttttttgaggacccgatctttaccttcagg

SEQ ID NO: 206 - DNA, 104 bp, synthetic construct
  source 1..104: mol_type = other DNA
gcagcgccccgcggtgttttagagctacctgaaggtaaagatcgggtcctcttttttttcagccaactccaattttttttgaggacccgatctttaccttcagg

SEQ ID NO: 207 - DNA, 104 bp, synthetic construct
  source 1..104: mol_type = other DNA
gcgcagtgacgtggggttttagagctacctgaaggtaaagatcgggtcctcttttttttcagccaactccaattttttttgaggacccgatctttaccttcagg

SEQ ID NO: 208 - DNA, 104 bp, synthetic construct
  source 1..104: mol_type = other DNA
gctgccccgggtctggttttagagctacctgaaggtaaagatcgggtcctcttttttttcagccaactccaattttttttgaggacccgatctttaccttcagg

SEQ ID NO: 209 - DNA, 102 bp, synthetic construct
  source 1..102: mol_type = other DNA
gcggtagttggaagtgttttagagctacctggttatagcggacgcactgtttttttttcagccaactccaattttttttacagtgcgtccgctataaccagg

SEQ ID NO: 210 - DNA, 102 bp, synthetic construct
  source 1..102: mol_type = other DNA
gcagcgccccgcggtgttttagagctacctggttatagcggacgcactgtttttttttcagccaactccaattttttttacagtgcgtccgctataaccagg

SEQ ID NO: 211 - DNA, 102 bp, synthetic construct
  source 1..102: mol_type = other DNA
gcgcagtgacgtggggttttagagctacctggttatagcggacgcactgtttttttttcagccaactccaattttttttacagtgcgtccgctataaccagg

SEQ ID NO: 212 - DNA, 102 bp, synthetic construct
  source 1..102: mol_type = other DNA
gctgccccgggtctggttttagagctacctggttatagcggacgcactgtttttttttcagccaactccaattttttttacagtgcgtccgctataaccagg

SEQ ID NO: 213 - DNA, 102 bp, synthetic construct
  source 1..102: mol_type = other DNA
gcggtagttggaagtgttttagagctaccgcatcgtattatctgcgaagcttttttttcagccaactccaattttttttgcttcgcagataatacgatgcgg

SEQ ID NO: 214 - DNA, 102 bp, synthetic construct
  source 1..102: mol_type = other DNA
gcagcgccccgcggtgttttagagctaccgcatcgtattatctgcgaagcttttttttcagccaactccaattttttttgcttcgcagataatacgatgcgg

SEQ ID NO: 215 - DNA, 102 bp, synthetic construct
  source 1..102: mol_type = other DNA
gcgcagtgacgtggggttttagagctaccgcatcgtattatctgcgaagcttttttttcagccaactccaattttttttgcttcgcagataatacgatgcgg

SEQ ID NO: 216 - DNA, 102 bp, synthetic construct
  source 1..102: mol_type = other DNA
gctgccccgggtctggttttagagctaccgcatcgtattatctgcgaagcttttttttcagccaactccaattttttttgcttcgcagataatacgatgcgg

SEQ ID NO: 217 - DNA, 102 bp, synthetic construct
  source 1..102: mol_type = other DNA
gcggtagttggaagtgttttagagctaccgctaggacgttcaacggagtcttttttttcagccaactccaattttttttgactccgttgaacgtcctagcgg

SEQ ID NO: 218 - DNA, 102 bp, synthetic construct
  source 1..102: mol_type = other DNA
gcagcgccccgcggtgttttagagctaccgctaggacgttcaacggagtcttttttttcagccaactccaattttttttgactccgttgaacgtcctagcgg

SEQ ID NO: 219 - DNA, 102 bp, synthetic construct
  source 1..102: mol_type = other DNA
gcgcagtgacgtggggttttagagctaccgctaggacgttcaacggagtcttttttttcagccaactccaattttttttgactccgttgaacgtcctagcgg

SEQ ID NO: 220 - DNA, 102 bp, synthetic construct
  source 1..102: mol_type = other DNA
gctgccccgggtctggttttagagctaccgctaggacgttcaacggagtcttttttttcagccaactccaattttttttgactccgttgaacgtcctagcgg

SEQ ID NO: 221 - DNA, 102 bp, synthetic construct
  source 1..102: mol_type = other DNA
gcggtagttggaagtgttttagagctaccatagcggtactatcggcatctttttttttcagccaactccaattttttttagatgccgatagtaccgctatgg

SEQ ID NO: 222 - DNA, 102 bp, synthetic construct
  source 1..102: mol_type = other DNA
gcagcgccccgcggtgttttagagctaccatagcggtactatcggcatctttttttttcagccaactccaattttttttagatgccgatagtaccgctatgg

SEQ ID NO: 223 - DNA, 102 bp, synthetic construct
  source 1..102: mol_type = other DNA
gcgcagtgacgtggggttttagagctaccatagcggtactatcggcatctttttttttcagccaactccaattttttttagatgccgatagtaccgctatgg

SEQ ID NO: 224 - DNA, 102 bp, synthetic construct
  source 1..102: mol_type = other DNA
gctgccccgggtctggttttagagctaccatagcggtactatcggcatctttttttttcagccaactccaattttttttagatgccgatagtaccgctatgg

SEQ ID NO: 225 - DNA, 102 bp, synthetic construct
  source 1..102: mol_type = other DNA
gcggtagttggaagtgttttagagctacctcgtactagtctcgcatgaccttttttttcagccaactccaattttttttggtcatgcgagactagtacgagg

SEQ ID NO: 226 - DNA, 102 bp, synthetic construct
  source 1..102: mol_type = other DNA
gcagcgccccgcggtgttttagagctacctcgtactagtctcgcatgaccttttttttcagccaactccaattttttttggtcatgcgagactagtacgagg

SEQ ID NO: 227 - DNA, 102 bp, synthetic construct
  source 1..102: mol_type = other DNA
gcgcagtgacgtggggttttagagctacctcgtactagtctcgcatgaccttttttttcagccaactccaattttttttggtcatgcgagactagtacgagg

SEQ ID NO: 228 - DNA, 102 bp, synthetic construct
  source 1..102: mol_type = other DNA
gctgccccgggtctggttttagagctacctcgtactagtctcgcatgaccttttttttcagccaactccaattttttttggtcatgcgagactagtacgagg

SEQ ID NO: 229 - DNA, 102 bp, synthetic construct
  source 1..102: mol_type = other DNA
gcggtagttggaagtgttttagagctaccgatagtgctaaacgacgctttttttttttcagccaactccaattttttttaaagcgtcgtttagcactatcgg

SEQ ID NO: 230 - DNA, 102 bp, synthetic construct
  source 1..102: mol_type = other DNA
gcagcgccccgcggtgttttagagctaccgatagtgctaaacgacgctttttttttttcagccaactccaattttttttaaagcgtcgtttagcactatcgg

SEQ ID NO: 231 - DNA, 102 bp, synthetic construct
  source 1..102: mol_type = other DNA
gcgcagtgacgtggggttttagagctaccgatagtgctaaacgacgctttttttttttcagccaactccaattttttttaaagcgtcgtttagcactatcgg

SEQ ID NO: 232 - DNA, 102 bp, synthetic construct
  source 1..102: mol_type = other DNA
gctgccccgggtctggttttagagctaccgatagtgctaaacgacgctttttttttttcagccaactccaattttttttaaagcgtcgtttagcactatcgg

SEQ ID NO: 233 - DNA, 102 bp, synthetic construct
  source 1..102: mol_type = other DNA
gcggtagttggaagtgttttagagctacccgttatcgacgttcaaggaacttttttttcagccaactccaattttttttgttccttgaacgtcgataacggg

SEQ ID NO: 234 - DNA, 102 bp, synthetic construct
  source 1..102: mol_type = other DNA
gcagcgccccgcggtgttttagagctacccgttatcgacgttcaaggaacttttttttcagccaactccaattttttttgttccttgaacgtcgataacggg

SEQ ID NO: 235 - DNA, 102 bp, synthetic construct
  source 1..102: mol_type = other DNA
gcgcagtgacgtggggttttagagctacccgttatcgacgttcaaggaacttttttttcagccaactccaattttttttgttccttgaacgtcgataacggg

SEQ ID NO: 236 - DNA, 102 bp, synthetic construct
  source 1..102: mol_type = other DNA
gctgccccgggtctggttttagagctacccgttatcgacgttcaaggaacttttttttcagccaactccaattttttttgttccttgaacgtcgataacggg

SEQ ID NO: 237 - DNA, 102 bp, synthetic construct
  source 1..102: mol_type = other DNA
gcggtagttggaagtgttttagagctaccgatcaatgcggtctgcgtaacttttttttcagccaactccaattttttttgttacgcagaccgcattgatcgg

SEQ ID NO: 238 - DNA, 102 bp, synthetic construct
  source 1..102: mol_type = other DNA
gcagcgccccgcggtgttttagagctaccgatcaatgcggtctgcgtaacttttttttcagccaactccaattttttttgttacgcagaccgcattgatcgg

SEQ ID NO: 239 - DNA, 102 bp, synthetic construct
  source 1..102: mol_type = other DNA
gcgcagtgacgtggggttttagagctaccgatcaatgcggtctgcgtaacttttttttcagccaactccaattttttttgttacgcagaccgcattgatcgg

SEQ ID NO: 240 - DNA, 102 bp, synthetic construct
  source 1..102: mol_type = other DNA
gctgccccgggtctggttttagagctaccgatcaatgcggtctgcgtaacttttttttcagccaactccaattttttttgttacgcagaccgcattgatcgg

SEQ ID NO: 241 - DNA, 102 bp, synthetic construct
  source 1..102: mol_type = other DNA
gcggtagttggaagtgttttagagctacccttactcgcgatactctcgacttttttttcagccaactccaattttttttgtcgagagtatcgcgagtaaggg

SEQ ID NO: 242 - DNA, 102 bp, synthetic construct
  source 1..102: mol_type = other DNA
gcagcgccccgcggtgttttagagctacccttactcgcgatactctcgacttttttttcagccaactccaattttttttgtcgagagtatcgcgagtaaggg

SEQ ID NO: 243 - DNA, 102 bp, synthetic construct
  source 1..102: mol_type = other DNA
gcgcagtgacgtggggttttagagctacccttactcgcgatactctcgacttttttttcagccaactccaattttttttgtcgagagtatcgcgagtaaggg

SEQ ID NO: 244 - DNA, 102 bp, synthetic construct
  source 1..102: mol_type = other DNA
gctgccccgggtctggttttagagctacccttactcgcgatactctcgacttttttttcagccaactccaattttttttgtcgagagtatcgcgagtaaggg

SEQ ID NO: 245 - DNA, 102 bp, synthetic construct
  source 1..102: mol_type = other DNA
gcggtagttggaagtgttttagagctaccgcggacggtaagcacggaatattttttttcagccaactccaatttttttttattccgtgcttaccgtccgcgg

SEQ ID NO: 246 - DNA, 102 bp, synthetic construct
  source 1..102: mol_type = other DNA
gcagcgccccgcggtgttttagagctaccgcggacggtaagcacggaatattttttttcagccaactccaatttttttttattccgtgcttaccgtccgcgg

SEQ ID NO: 247 - DNA, 102 bp, synthetic construct
  source 1..102: mol_type = other DNA
gcgcagtgacgtggggttttagagctaccgcggacggtaagcacggaatattttttttcagccaactccaatttttttttattccgtgcttaccgtccgcgg

SEQ ID NO: 248 - DNA, 102 bp, synthetic construct
  source 1..102: mol_type = other DNA
gctgccccgggtctggttttagagctaccgcggacggtaagcacggaatattttttttcagccaactccaatttttttttattccgtgcttaccgtccgcgg

SEQ ID NO: 249 - DNA, 102 bp, synthetic construct
  source 1..102: mol_type = other DNA
gcggtagttggaagtgttttagagctacctatagtcacgaatcgtagggtttttttttcagccaactccaattttttttaccctacgattcgtgactatagg

SEQ ID NO: 250 - DNA, 102 bp, synthetic construct
  source 1..102: mol_type = other DNA
gcagcgccccgcggtgttttagagctacctatagtcacgaatcgtagggtttttttttcagccaactccaattttttttaccctacgattcgtgactatagg

SEQ ID NO: 251 - DNA, 102 bp, synthetic construct
  source 1..102: mol_type = other DNA
gcgcagtgacgtggggttttagagctacctatagtcacgaatcgtagggtttttttttcagccaactccaattttttttaccctacgattcgtgactatagg

SEQ ID NO: 252 - DNA, 102 bp, synthetic construct
  source 1..102: mol_type = other DNA
gctgccccgggtctggttttagagctacctatagtcacgaatcgtagggtttttttttcagccaactccaattttttttaccctacgattcgtgactatagg

SEQ ID NO: 253 - DNA, 102 bp, synthetic construct
  source 1..102: mol_type = other DNA
gcggtagttggaagtgttttagagctacccgtcgtcacgtatgcgtagcattttttttcagccaactccaatttttttttgctacgcatacgtgacgacggg

SEQ ID NO: 254 - DNA, 102 bp, synthetic construct
  source 1..102: mol_type = other DNA
gcagcgccccgcggtgttttagagctacccgtcgtcacgtatgcgtagcattttttttcagccaactccaatttttttttgctacgcatacgtgacgacggg

SEQ ID NO: 255 - DNA, 102 bp, synthetic construct
  source 1..102: mol_type = other DNA
gcgcagtgacgtggggttttagagctacccgtcgtcacgtatgcgtagcattttttttcagccaactccaatttttttttgctacgcatacgtgacgacggg

SEQ ID NO: 256 - DNA, 102 bp, synthetic construct
  source 1..102: mol_type = other DNA
gctgccccgggtctggttttagagctacccgtcgtcacgtatgcgtagcattttttttcagccaactccaatttttttttgctacgcatacgtgacgacggg

SEQ ID NO: 257 - DNA, 102 bp, synthetic construct
  source 1..102: mol_type = other DNA
gcggtagttggaagtgttttagagctacccgagaggtagtagacgacgcattttttttcagccaactccaatttttttttgcgtcgtctactacctctcggg

SEQ ID NO: 258 - DNA, 102 bp, synthetic construct
  source 1..102: mol_type = other DNA
gcagcgccccgcggtgttttagagctacccgagaggtagtagacgacgcattttttttcagccaactccaatttttttttgcgtcgtctactacctctcggg

SEQ ID NO: 259 - DNA, 102 bp, synthetic construct
  source 1..102: mol_type = other DNA
gcgcagtgacgtggggttttagagctacccgagaggtagtagacgacgcattttttttcagccaactccaatttttttttgcgtcgtctactacctctcggg

SEQ ID NO: 260 - DNA, 102 bp, synthetic construct
  source 1..102: mol_type = other DNA
gctgccccgggtctggttttagagctacccgagaggtagtagacgacgcattttttttcagccaactccaatttttttttgcgtcgtctactacctctcggg

SEQ ID NO: 261 - DNA, 102 bp, synthetic construct
  source 1..102: mol_type = other DNA
gcggtagttggaagtgttttagagctaccgacgtctacggacgggagctattttttttcagccaactccaatttttttttagctcccgtccgtagacgtcgg

SEQ ID NO: 262 - DNA, 102 bp, synthetic construct
  source 1..102: mol_type = other DNA
gcagcgccccgcggtgttttagagctaccgacgtctacggacgggagctattttttttcagccaactccaatttttttttagctcccgtccgtagacgtcgg

SEQ ID NO: 263 - DNA, 102 bp, synthetic construct
  source 1..102: mol_type = other DNA
gcgcagtgacgtggggttttagagctaccgacgtctacggacgggagctattttttttcagccaactccaatttttttttagctcccgtccgtagacgtcgg

SEQ ID NO: 264 - DNA, 102 bp, synthetic construct
  source 1..102: mol_type = other DNA
gctgccccgggtctggttttagagctaccgacgtctacggacgggagctattttttttcagccaactccaatttttttttagctcccgtccgtagacgtcgg

SEQ ID NO: 265 - DNA, 102 bp, synthetic construct
  source 1..102: mol_type = other DNA
gcggtagttggaagtgttttagagctaccaaagctcattcgcgactgagcttttttttcagccaactccaattttttttgctcagtcgcgaatgagctttgg

SEQ ID NO: 266 - DNA, 102 bp, synthetic construct
  source 1..102: mol_type = other DNA
gcagcgccccgcggtgttttagagctaccaaagctcattcgcgactgagcttttttttcagccaactccaattttttttgctcagtcgcgaatgagctttgg

SEQ ID NO: 267 - DNA, 102 bp, synthetic construct
  source 1..102: mol_type = other DNA
gcgcagtgacgtggggttttagagctaccaaagctcattcgcgactgagcttttttttcagccaactccaattttttttgctcagtcgcgaatgagctttgg

SEQ ID NO: 268 - DNA, 102 bp, synthetic construct
  source 1..102: mol_type = other DNA
gctgccccgggtctggttttagagctaccaaagctcattcgcgactgagcttttttttcagccaactccaattttttttgctcagtcgcgaatgagctttgg

SEQ ID NO: 269 - DNA, 102 bp, synthetic construct
  source 1..102: mol_type = other DNA
gcggtagttggaagtgttttagagctaccatggcacgatcgacacggaggttttttttcagccaactccaattttttttcctccgtgtcgatcgtgccatgg

SEQ ID NO: 270 - DNA, 102 bp, synthetic construct
  source 1..102: mol_type = other DNA
gcagcgccccgcggtgttttagagctaccatggcacgatcgacacggaggttttttttcagccaactccaattttttttcctccgtgtcgatcgtgccatgg

SEQ ID NO: 271 - DNA, 102 bp, synthetic construct
  source 1..102: mol_type = other DNA
gcgcagtgacgtggggttttagagctaccatggcacgatcgacacggaggttttttttcagccaactccaattttttttcctccgtgtcgatcgtgccatgg

SEQ ID NO: 272 - DNA, 102 bp, synthetic construct
  source 1..102: mol_type = other DNA
gctgccccgggtctggttttagagctaccatggcacgatcgacacggaggttttttttcagccaactccaattttttttcctccgtgtcgatcgtgccatgg

SEQ ID NO: 273 - DNA, 102 bp, synthetic construct
  source 1..102: mol_type = other DNA
gcggtagttggaagtgttttagagctacccgaactctctatcgaacgagtttttttttcagccaactccaattttttttactcgttcgatagagagttcggg

SEQ ID NO: 274 - DNA, 102 bp, synthetic construct
  source 1..102: mol_type = other DNA
gcagcgccccgcggtgttttagagctacccgaactctctatcgaacgagtttttttttcagccaactccaattttttttactcgttcgatagagagttcggg

SEQ ID NO: 275 - DNA, 102 bp, synthetic construct
  source 1..102: mol_type = other DNA
gcgcagtgacgtggggttttagagctacccgaactctctatcgaacgagtttttttttcagccaactccaattttttttactcgttcgatagagagttcggg

SEQ ID NO: 276 - DNA, 102 bp, synthetic construct
  source 1..102: mol_type = other DNA
gctgccccgggtctggttttagagctacccgaactctctatcgaacgagtttttttttcagccaactccaattttttttactcgttcgatagagagttcggg

SEQ ID NO: 277 - DNA, 103 bp, synthetic construct
  source 1..103: mol_type = other DNA
gattgggttcgctggttttagagctaccgtcgttgtaccgtctacttgacttttttttcagccaactccaattttttttgtcaagtagacggtacaacgacgg

SEQ ID NO: 278 - DNA, 104 bp, synthetic construct
  source 1..104: mol_type = other DNA
gcctccgctgggcgcgttttagagctaccgtcgttgtaccgtctacttgacttttttttcagccaactccaattttttttgtcaagtagacggtacaacgacgg

SEQ ID NO: 279 - DNA, 103 bp, synthetic construct
  source 1..103: mol_type = other DNA
gcaactcggccctagttttagagctaccgtcgttgtaccgtctacttgacttttttttcagccaactccaattttttttgtcaagtagacggtacaacgacgg

SEQ ID NO: 280 - DNA, 103 bp, synthetic construct
  source 1..103: mol_type = other DNA
gggatgaggaccacgttttagagctaccgtcgttgtaccgtctacttgacttttttttcagccaactccaattttttttgtcaagtagacggtacaacgacgg

SEQ ID NO: 281 - DNA, 101 bp, synthetic construct
  source 1..101: mol_type = other DNA
gattgggttcgctggttttagagctacctacactcgacatcggtagctattttttttcagccaactccaatttttttttagctaccgatgtcgagtgtagg

SEQ ID NO: 282 - DNA, 102 bp, synthetic construct
  source 1..102: mol_type = other DNA
gcctccgctgggcgcgttttagagctacctacactcgacatcggtagctattttttttcagccaactccaatttttttttagctaccgatgtcgagtgtagg

SEQ ID NO: 283 - DNA, 101 bp, synthetic construct
  source 1..101: mol_type = other DNA
gcaactcggccctagttttagagctacctacactcgacatcggtagctattttttttcagccaactccaatttttttttagctaccgatgtcgagtgtagg

SEQ ID NO: 284 - DNA, 101 bp, synthetic construct
  source 1..101: mol_type = other DNA
gggatgaggaccacgttttagagctacctacactcgacatcggtagctattttttttcagccaactccaatttttttttagctaccgatgtcgagtgtagg

SEQ ID NO: 285 - DNA, 101 bp, synthetic construct
  source 1..101: mol_type = other DNA
gattgggttcgctggttttagagctaccctggcggaacgttcgagtaatttttttttcagccaactccaattttttttattactcgaacgttccgccaggg

SEQ ID NO: 286 - DNA, 102 bp, synthetic construct
  source 1..102: mol_type = other DNA
gcctccgctgggcgcgttttagagctaccctggcggaacgttcgagtaatttttttttcagccaactccaattttttttattactcgaacgttccgccaggg

SEQ ID NO: 287 - DNA, 101 bp, synthetic construct
  source 1..101: mol_type = other DNA
gcaactcggccctagttttagagctaccctggcggaacgttcgagtaatttttttttcagccaactccaattttttttattactcgaacgttccgccaggg

SEQ ID NO: 288 - DNA, 101 bp, synthetic construct
  source 1..101: mol_type = other DNA
gggatgaggaccacgttttagagctaccctggcggaacgttcgagtaatttttttttcagccaactccaattttttttattactcgaacgttccgccaggg

SEQ ID NO: 289 - DNA, 101 bp, synthetic construct
  source 1..101: mol_type = other DNA
gattgggttcgctggttttagagctacctacacgatagtggtcgtgcgcttttttttcagccaactccaattttttttgcgcacgaccactatcgtgtagg

SEQ ID NO: 290 - DNA, 102 bp, synthetic construct
  source 1..102: mol_type = other DNA
gcctccgctgggcgcgttttagagctacctacacgatagtggtcgtgcgcttttttttcagccaactccaattttttttgcgcacgaccactatcgtgtagg

SEQ ID NO: 291 - DNA, 101 bp, synthetic construct
  source 1..101: mol_type = other DNA
gcaactcggccctagttttagagctacctacacgatagtggtcgtgcgcttttttttcagccaactccaattttttttgcgcacgaccactatcgtgtagg

SEQ ID NO: 292 - DNA, 101 bp, synthetic construct
  source 1..101: mol_type = other DNA
gggatgaggaccacgttttagagctacctacacgatagtggtcgtgcgcttttttttcagccaactccaattttttttgcgcacgaccactatcgtgtagg

SEQ ID NO: 293 - DNA, 103 bp, synthetic construct
  source 1..103: mol_type = other DNA
gattgggttcgctggttttagagctaccttcccgacttccgtaggagcgcttttttttcagccaactccaattttttttgcgctcctacggaagtcgggaagg

SEQ ID NO: 294 - DNA, 104 bp, synthetic construct
  source 1..104: mol_type = other DNA
gcctccgctgggcgcgttttagagctaccttcccgacttccgtaggagcgcttttttttcagccaactccaattttttttgcgctcctacggaagtcgggaagg

SEQ ID NO: 295 - DNA, 103 bp, synthetic construct
  source 1..103: mol_type = other DNA
gcaactcggccctagttttagagctaccttcccgacttccgtaggagcgcttttttttcagccaactccaattttttttgcgctcctacggaagtcgggaagg

SEQ ID NO: 296 - DNA, 103 bp, synthetic construct
  source 1..103: mol_type = other DNA
gggatgaggaccacgttttagagctaccttcccgacttccgtaggagcgcttttttttcagccaactccaattttttttgcgctcctacggaagtcgggaagg

SEQ ID NO: 297 - DNA, 103 bp, synthetic construct
  source 1..103: mol_type = other DNA
gattgggttcgctggttttagagctacctgaaggtaaagatcgggtcctcttttttttcagccaactccaattttttttgaggacccgatctttaccttcagg

SEQ ID NO: 298 - DNA, 104 bp, synthetic construct
  source 1..104: mol_type = other DNA
gcctccgctgggcgcgttttagagctacctgaaggtaaagatcgggtcctcttttttttcagccaactccaattttttttgaggacccgatctttaccttcagg

SEQ ID NO: 299 - DNA, 103 bp, synthetic construct
  source 1..103: mol_type = other DNA
gcaactcggccctagttttagagctacctgaaggtaaagatcgggtcctcttttttttcagccaactccaattttttttgaggacccgatctttaccttcagg

SEQ ID NO: 300 - DNA, 103 bp, synthetic construct
  source 1..103: mol_type = other DNA
gggatgaggaccacgttttagagctacctgaaggtaaagatcgggtcctcttttttttcagccaactccaattttttttgaggacccgatctttaccttcagg

SEQ ID NO: 301 - DNA, 101 bp, synthetic construct
  source 1..101: mol_type = other DNA
gattgggttcgctggttttagagctacctggttatagcggacgcactgtttttttttcagccaactccaattttttttacagtgcgtccgctataaccagg

SEQ ID NO: 302 - DNA, 102 bp, synthetic construct
  source 1..102: mol_type = other DNA
gcctccgctgggcgcgttttagagctacctggttatagcggacgcactgtttttttttcagccaactccaattttttttacagtgcgtccgctataaccagg

SEQ ID NO: 303 - DNA, 101 bp, synthetic construct
  source 1..101: mol_type = other DNA
gcaactcggccctagttttagagctacctggttatagcggacgcactgtttttttttcagccaactccaattttttttacagtgcgtccgctataaccagg

SEQ ID NO: 304 - DNA, 101 bp, synthetic construct
  source 1..101: mol_type = other DNA
gggatgaggaccacgttttagagctacctggttatagcggacgcactgtttttttttcagccaactccaattttttttacagtgcgtccgctataaccagg

SEQ ID NO: 305 - DNA, 101 bp, synthetic construct
  source 1..101: mol_type = other DNA
gattgggttcgctggttttagagctaccgcatcgtattatctgcgaagcttttttttcagccaactccaattttttttgcttcgcagataatacgatgcgg

SEQ ID NO: 306 - DNA, 102 bp, synthetic construct
  source 1..102: mol_type = other DNA
gcctccgctgggcgcgttttagagctaccgcatcgtattatctgcgaagcttttttttcagccaactccaattttttttgcttcgcagataatacgatgcgg

SEQ ID NO: 307 - DNA, 101 bp, synthetic construct
  source 1..101: mol_type = other DNA
gcaactcggccctagttttagagctaccgcatcgtattatctgcgaagcttttttttcagccaactccaattttttttgcttcgcagataatacgatgcgg

SEQ ID NO: 308 - DNA, 101 bp, synthetic construct
  source 1..101: mol_type = other DNA
gggatgaggaccacgttttagagctaccgcatcgtattatctgcgaagcttttttttcagccaactccaattttttttgcttcgcagataatacgatgcgg

SEQ ID NO: 309 - DNA, 101 bp, synthetic construct
  source 1..101: mol_type = other DNA
gattgggttcgctggttttagagctaccgctaggacgttcaacggagtcttttttttcagccaactccaattttttttgactccgttgaacgtcctagcgg

SEQ ID NO: 310 - DNA, 102 bp, synthetic construct
  source 1..102: mol_type = other DNA
gcctccgctgggcgcgttttagagctaccgctaggacgttcaacggagtcttttttttcagccaactccaattttttttgactccgttgaacgtcctagcgg

SEQ ID NO: 311 - DNA, 101 bp, synthetic construct
  source 1..101: mol_type = other DNA
gcaactcggccctagttttagagctaccgctaggacgttcaacggagtcttttttttcagccaactccaattttttttgactccgttgaacgtcctagcgg

SEQ ID NO: 312 - DNA, 101 bp, synthetic construct
  source 1..101: mol_type = other DNA
gggatgaggaccacgttttagagctaccgctaggacgttcaacggagtcttttttttcagccaactccaattttttttgactccgttgaacgtcctagcgg

SEQ ID NO: 313 - DNA, 101 bp, synthetic construct
  source 1..101: mol_type = other DNA
gattgggttcgctggttttagagctaccatagcggtactatcggcatctttttttttcagccaactccaattttttttagatgccgatagtaccgctatgg

SEQ ID NO: 314 - DNA, 102 bp, synthetic construct
  source 1..102: mol_type = other DNA
gcctccgctgggcgcgttttagagctaccatagcggtactatcggcatctttttttttcagccaactccaattttttttagatgccgatagtaccgctatgg

SEQ ID NO: 315 - DNA, 101 bp, synthetic construct
  source 1..101: mol_type = other DNA
gcaactcggccctagttttagagctaccatagcggtactatcggcatctttttttttcagccaactccaattttttttagatgccgatagtaccgctatgg

SEQ ID NO: 316 - DNA, 101 bp, synthetic construct
  source 1..101: mol_type = other DNA
gggatgaggaccacgttttagagctaccatagcggtactatcggcatctttttttttcagccaactccaattttttttagatgccgatagtaccgctatgg

SEQ ID NO: 317 - DNA, 101 bp, synthetic construct
  source 1..101: mol_type = other DNA
gattgggttcgctggttttagagctacctcgtactagtctcgcatgaccttttttttcagccaactccaattttttttggtcatgcgagactagtacgagg

SEQ ID NO: 318 - DNA, 102 bp, synthetic construct
  source 1..102: mol_type = other DNA
gcctccgctgggcgcgttttagagctacctcgtactagtctcgcatgaccttttttttcagccaactccaattttttttggtcatgcgagactagtacgagg

SEQ ID NO: 319 - DNA, 101 bp, synthetic construct
  source 1..101: mol_type = other DNA
gcaactcggccctagttttagagctacctcgtactagtctcgcatgaccttttttttcagccaactccaattttttttggtcatgcgagactagtacgagg

SEQ ID NO: 320 - DNA, 101 bp, synthetic construct
  source 1..101: mol_type = other DNA
gggatgaggaccacgttttagagctacctcgtactagtctcgcatgaccttttttttcagccaactccaattttttttggtcatgcgagactagtacgagg

SEQ ID NO: 321 - DNA, 101 bp, synthetic construct
  source 1..101: mol_type = other DNA
gattgggttcgctggttttagagctaccgatagtgctaaacgacgctttttttttttcagccaactccaattttttttaaagcgtcgtttagcactatcgg

SEQ ID NO: 322 - DNA, 102 bp, synthetic construct
  source 1..102: mol_type = other DNA
gcctccgctgggcgcgttttagagctaccgatagtgctaaacgacgctttttttttttcagccaactccaattttttttaaagcgtcgtttagcactatcgg

SEQ ID NO: 323 - DNA, 101 bp, synthetic construct
  source 1..101: mol_type = other DNA
gcaactcggccctagttttagagctaccgatagtgctaaacgacgctttttttttttcagccaactccaattttttttaaagcgtcgtttagcactatcgg

SEQ ID NO: 324 - DNA, 101 bp, synthetic construct
  source 1..101: mol_type = other DNA
gggatgaggaccacgttttagagctaccgatagtgctaaacgacgctttttttttttcagccaactccaattttttttaaagcgtcgtttagcactatcgg

SEQ ID NO: 325 - DNA, 101 bp, synthetic construct
  source 1..101: mol_type = other DNA
gattgggttcgctggttttagagctacccgttatcgacgttcaaggaacttttttttcagccaactccaattttttttgttccttgaacgtcgataacggg

SEQ ID NO: 326 - DNA, 102 bp, synthetic construct
  source 1..102: mol_type = other DNA
gcctccgctgggcgcgttttagagctacccgttatcgacgttcaaggaacttttttttcagccaactccaattttttttgttccttgaacgtcgataacggg

SEQ ID NO: 327 - DNA, 101 bp, synthetic construct
  source 1..101: mol_type = other DNA
gcaactcggccctagttttagagctacccgttatcgacgttcaaggaacttttttttcagccaactccaattttttttgttccttgaacgtcgataacggg

SEQ ID NO: 328 - DNA, 101 bp, synthetic construct
  source 1..101: mol_type = other DNA
gggatgaggaccacgttttagagctacccgttatcgacgttcaaggaacttttttttcagccaactccaattttttttgttccttgaacgtcgataacggg

SEQ ID NO: 329 - DNA, 101 bp, synthetic construct
  source 1..101: mol_type = other DNA
gattgggttcgctggttttagagctaccgatcaatgcggtctgcgtaacttttttttcagccaactccaattttttttgttacgcagaccgcattgatcgg

SEQ ID NO: 330 - DNA, 102 bp, synthetic construct
  source 1..102: mol_type = other DNA
gcctccgctgggcgcgttttagagctaccgatcaatgcggtctgcgtaacttttttttcagccaactccaattttttttgttacgcagaccgcattgatcgg

SEQ ID NO: 331 - DNA, 101 bp, synthetic construct
  source 1..101: mol_type = other DNA
gcaactcggccctagttttagagctaccgatcaatgcggtctgcgtaacttttttttcagccaactccaattttttttgttacgcagaccgcattgatcgg

SEQ ID NO: 332 - DNA, 101 bp, synthetic construct
  source 1..101: mol_type = other DNA
gggatgaggaccacgttttagagctaccgatcaatgcggtctgcgtaacttttttttcagccaactccaattttttttgttacgcagaccgcattgatcgg

SEQ ID NO: 333 - DNA, 101 bp, synthetic construct
  source 1..101: mol_type = other DNA
gattgggttcgctggttttagagctacccttactcgcgatactctcgacttttttttcagccaactccaattttttttgtcgagagtatcgcgagtaaggg

SEQ ID NO: 334 - DNA, 102 bp, synthetic construct
  source 1..102: mol_type = other DNA
gcctccgctgggcgcgttttagagctacccttactcgcgatactctcgacttttttttcagccaactccaattttttttgtcgagagtatcgcgagtaaggg

SEQ ID NO: 335 - DNA, 101 bp, synthetic construct
  source 1..101: mol_type = other DNA
gcaactcggccctagttttagagctacccttactcgcgatactctcgacttttttttcagccaactccaattttttttgtcgagagtatcgcgagtaaggg

SEQ ID NO: 336 - DNA, 101 bp, synthetic construct
  source 1..101: mol_type = other DNA
gggatgaggaccacgttttagagctacccttactcgcgatactctcgacttttttttcagccaactccaattttttttgtcgagagtatcgcgagtaaggg

SEQ ID NO: 337 - DNA, 101 bp, synthetic construct
  source 1..101: mol_type = other DNA
gattgggttcgctggttttagagctaccgcggacggtaagcacggaatattttttttcagccaactccaatttttttttattccgtgcttaccgtccgcgg

SEQ ID NO: 338 - DNA, 102 bp, synthetic construct
  source 1..102: mol_type = other DNA
gcctccgctgggcgcgttttagagctaccgcggacggtaagcacggaatattttttttcagccaactccaatttttttttattccgtgcttaccgtccgcgg

SEQ ID NO: 339 - DNA, 101 bp, synthetic construct
  source 1..101: mol_type = other DNA
gcaactcggccctagttttagagctaccgcggacggtaagcacggaatattttttttcagccaactccaatttttttttattccgtgcttaccgtccgcgg

SEQ ID NO: 340 - DNA, 101 bp, synthetic construct
  source 1..101: mol_type = other DNA
gggatgaggaccacgttttagagctaccgcggacggtaagcacggaatattttttttcagccaactccaatttttttttattccgtgcttaccgtccgcgg

SEQ ID NO: 341 - DNA, 101 bp, synthetic construct
  source 1..101: mol_type = other DNA
gattgggttcgctggttttagagctacctatagtcacgaatcgtagggtttttttttcagccaactccaattttttttaccctacgattcgtgactatagg

SEQ ID NO: 342 - DNA, 102 bp, synthetic construct
  source 1..102: mol_type = other DNA
gcctccgctgggcgcgttttagagctacctatagtcacgaatcgtagggtttttttttcagccaactccaattttttttaccctacgattcgtgactatagg

SEQ ID NO: 343 - DNA, 101 bp, synthetic construct
  source 1..101: mol_type = other DNA
gcaactcggccctagttttagagctacctatagtcacgaatcgtagggtttttttttcagccaactccaattttttttaccctacgattcgtgactatagg

SEQ ID NO: 344 - DNA, 101 bp, synthetic construct
  source 1..101: mol_type = other DNA
gggatgaggaccacgttttagagctacctatagtcacgaatcgtagggtttttttttcagccaactccaattttttttaccctacgattcgtgactatagg

SEQ ID NO: 345 - DNA, 101 bp, synthetic construct
  source 1..101: mol_type = other DNA
gattgggttcgctggttttagagctacccgtcgtcacgtatgcgtagcattttttttcagccaactccaatttttttttgctacgcatacgtgacgacggg

SEQ ID NO: 346 - DNA, 102 bp, synthetic construct
  source 1..102: mol_type = other DNA
gcctccgctgggcgcgttttagagctacccgtcgtcacgtatgcgtagcattttttttcagccaactccaatttttttttgctacgcatacgtgacgacggg

SEQ ID NO: 347 - DNA, 101 bp, synthetic construct
  source 1..101: mol_type = other DNA
gcaactcggccctagttttagagctacccgtcgtcacgtatgcgtagcattttttttcagccaactccaatttttttttgctacgcatacgtgacgacggg

SEQ ID NO: 348 - DNA, 101 bp, synthetic construct
  source 1..101: mol_type = other DNA
gggatgaggaccacgttttagagctacccgtcgtcacgtatgcgtagcattttttttcagccaactccaatttttttttgctacgcatacgtgacgacggg

SEQ ID NO: 349 - DNA, 101 bp, synthetic construct
  source 1..101: mol_type = other DNA
gattgggttcgctggttttagagctacccgagaggtagtagacgacgcattttttttcagccaactccaatttttttttgcgtcgtctactacctctcggg

SEQ ID NO: 350 - DNA, 102 bp, synthetic construct
  source 1..102: mol_type = other DNA
gcctccgctgggcgcgttttagagctacccgagaggtagtagacgacgcattttttttcagccaactccaatttttttttgcgtcgtctactacctctcggg

SEQ ID NO: 351 - DNA, 101 bp, synthetic construct
  source 1..101: mol_type = other DNA
gcaactcggccctagttttagagctacccgagaggtagtagacgacgcattttttttcagccaactccaatttttttttgcgtcgtctactacctctcggg

SEQ ID NO: 352 - DNA, 101 bp, synthetic construct
  source 1..101: mol_type = other DNA
gggatgaggaccacgttttagagctacccgagaggtagtagacgacgcattttttttcagccaactccaatttttttttgcgtcgtctactacctctcggg

SEQ ID NO: 353 - DNA, 101 bp, synthetic construct
  source 1..101: mol_type = other DNA
gattgggttcgctggttttagagctaccgacgtctacggacgggagctattttttttcagccaactccaatttttttttagctcccgtccgtagacgtcgg

SEQ ID NO: 354 - DNA, 102 bp, synthetic construct
  source 1..102: mol_type = other DNA
gcctccgctgggcgcgttttagagctaccgacgtctacggacgggagctattttttttcagccaactccaatttttttttagctcccgtccgtagacgtcgg

SEQ ID NO: 355 - DNA, 101 bp, synthetic construct
  source 1..101: mol_type = other DNA
gcaactcggccctagttttagagctaccgacgtctacggacgggagctattttttttcagccaactccaatttttttttagctcccgtccgtagacgtcgg

SEQ ID NO: 356 - DNA, 101 bp, synthetic construct
  source 1..101: mol_type = other DNA
gggatgaggaccacgttttagagctaccgacgtctacggacgggagctattttttttcagccaactccaatttttttttagctcccgtccgtagacgtcgg

SEQ ID NO: 357 - DNA, 101 bp, synthetic construct
  source 1..101: mol_type = other DNA
gattgggttcgctggttttagagctaccaaagctcattcgcgactgagcttttttttcagccaactccaattttttttgctcagtcgcgaatgagctttgg

SEQ ID NO: 358 - DNA, 102 bp, synthetic construct
  source 1..102: mol_type = other DNA
gcctccgctgggcgcgttttagagctaccaaagctcattcgcgactgagcttttttttcagccaactccaattttttttgctcagtcgcgaatgagctttgg

SEQ ID NO: 359 - DNA, 101 bp, synthetic construct
  source 1..101: mol_type = other DNA
gcaactcggccctagttttagagctaccaaagctcattcgcgactgagcttttttttcagccaactccaattttttttgctcagtcgcgaatgagctttgg

SEQ ID NO: 360 - DNA, 101 bp, synthetic construct
  source 1..101: mol_type = other DNA
gggatgaggaccacgttttagagctaccaaagctcattcgcgactgagcttttttttcagccaactccaattttttttgctcagtcgcgaatgagctttgg

SEQ ID NO: 361 - DNA, 101 bp, synthetic construct
  source 1..101: mol_type = other DNA
gattgggttcgctggttttagagctaccatggcacgatcgacacggaggttttttttcagccaactccaattttttttcctccgtgtcgatcgtgccatgg

SEQ ID NO: 362 - DNA, 102 bp, synthetic construct
  source 1..102: mol_type = other DNA
gcctccgctgggcgcgttttagagctaccatggcacgatcgacacggaggttttttttcagccaactccaattttttttcctccgtgtcgatcgtgccatgg

SEQ ID NO: 363 - DNA, 101 bp, synthetic construct
  source 1..101: mol_type = other DNA
gcaactcggccctagttttagagctaccatggcacgatcgacacggaggttttttttcagccaactccaattttttttcctccgtgtcgatcgtgccatgg

SEQ ID NO: 364 - DNA, 101 bp, synthetic construct
  source 1..101: mol_type = other DNA
gggatgaggaccacgttttagagctaccatggcacgatcgacacggaggttttttttcagccaactccaattttttttcctccgtgtcgatcgtgccatgg

SEQ ID NO: 365 - DNA, 101 bp, synthetic construct
  source 1..101: mol_type = other DNA
gattgggttcgctggttttagagctacccgaactctctatcgaacgagtttttttttcagccaactccaattttttttactcgttcgatagagagttcggg

SEQ ID NO: 366 - DNA, 102 bp, synthetic construct
  source 1..102: mol_type = other DNA
gcctccgctgggcgcgttttagagctacccgaactctctatcgaacgagtttttttttcagccaactccaattttttttactcgttcgatagagagttcggg

SEQ ID NO: 367 - DNA, 101 bp, synthetic construct
  source 1..101: mol_type = other DNA
gcaactcggccctagttttagagctacccgaactctctatcgaacgagtttttttttcagccaactccaattttttttactcgttcgatagagagttcggg

SEQ ID NO: 368 - DNA, 101 bp, synthetic construct
  source 1..101: mol_type = other DNA
gggatgaggaccacgttttagagctacccgaactctctatcgaacgagtttttttttcagccaactccaattttttttactcgttcgatagagagttcggg

SEQ ID NO: 369 - DNA, 103 bp, synthetic construct
  source 1..103: mol_type = other DNA
gcgctgtttgtttagttttagagctaccgtcgttgtaccgtctacttgacttttttttcagccaactccaattttttttgtcaagtagacggtacaacgacgg

SEQ ID NO: 370 - DNA, 104 bp, synthetic construct
  source 1..104: mol_type = other DNA
gccgcacccatccaggttttagagctaccgtcgttgtaccgtctacttgacttttttttcagccaactccaattttttttgtcaagtagacggtacaacgacgg

SEQ ID NO: 371 - DNA, 103 bp, synthetic construct
  source 1..103: mol_type = other DNA
gcgagtccacccgggttttagagctaccgtcgttgtaccgtctacttgacttttttttcagccaactccaattttttttgtcaagtagacggtacaacgacgg

SEQ ID NO: 372 - DNA, 103 bp, synthetic construct
  source 1..103: mol_type = other DNA
gagcagctgggcgcgttttagagctaccgtcgttgtaccgtctacttgacttttttttcagccaactccaattttttttgtcaagtagacggtacaacgacgg

SEQ ID NO: 373 - DNA, 101 bp, synthetic construct
  source 1..101: mol_type = other DNA
gcgctgtttgtttagttttagagctacctacactcgacatcggtagctattttttttcagccaactccaatttttttttagctaccgatgtcgagtgtagg

SEQ ID NO: 374 - DNA, 102 bp, synthetic construct
  source 1..102: mol_type = other DNA
gccgcacccatccaggttttagagctacctacactcgacatcggtagctattttttttcagccaactccaatttttttttagctaccgatgtcgagtgtagg

SEQ ID NO: 375 - DNA, 101 bp, synthetic construct
  source 1..101: mol_type = other DNA
gcgagtccacccgggttttagagctacctacactcgacatcggtagctattttttttcagccaactccaatttttttttagctaccgatgtcgagtgtagg

SEQ ID NO: 376 - DNA, 101 bp, synthetic construct
  source 1..101: mol_type = other DNA
gagcagctgggcgcgttttagagctacctacactcgacatcggtagctattttttttcagccaactccaatttttttttagctaccgatgtcgagtgtagg

SEQ ID NO: 377 - DNA, 101 bp, synthetic construct
  source 1..101: mol_type = other DNA
gcgctgtttgtttagttttagagctaccctggcggaacgttcgagtaatttttttttcagccaactccaattttttttattactcgaacgttccgccaggg

SEQ ID NO: 378 - DNA, 102 bp, synthetic construct
  source 1..102: mol_type = other DNA
gccgcacccatccaggttttagagctaccctggcggaacgttcgagtaatttttttttcagccaactccaattttttttattactcgaacgttccgccaggg

SEQ ID NO: 379 - DNA, 101 bp, synthetic construct
  source 1..101: mol_type = other DNA
gcgagtccacccgggttttagagctaccctggcggaacgttcgagtaatttttttttcagccaactccaattttttttattactcgaacgttccgccaggg

SEQ ID NO: 380 - DNA, 101 bp, synthetic construct
  source 1..101: mol_type = other DNA
gagcagctgggcgcgttttagagctaccctggcggaacgttcgagtaatttttttttcagccaactccaattttttttattactcgaacgttccgccaggg

SEQ ID NO: 381 - DNA, 101 bp, synthetic construct
  source 1..101: mol_type = other DNA
gcgctgtttgtttagttttagagctacctacacgatagtggtcgtgcgcttttttttcagccaactccaattttttttgcgcacgaccactatcgtgtagg

SEQ ID NO: 382 - DNA, 102 bp, synthetic construct
  source 1..102: mol_type = other DNA
gccgcacccatccaggttttagagctacctacacgatagtggtcgtgcgcttttttttcagccaactccaattttttttgcgcacgaccactatcgtgtagg

SEQ ID NO: 383 - DNA, 101 bp, synthetic construct
  source 1..101: mol_type = other DNA
gcgagtccacccgggttttagagctacctacacgatagtggtcgtgcgcttttttttcagccaactccaattttttttgcgcacgaccactatcgtgtagg

SEQ ID NO: 384 - DNA, 101 bp, synthetic construct
  source 1..101: mol_type = other DNA
gagcagctgggcgcgttttagagctacctacacgatagtggtcgtgcgcttttttttcagccaactccaattttttttgcgcacgaccactatcgtgtagg

SEQ ID NO: 385 - DNA, 103 bp, synthetic construct
  source 1..103: mol_type = other DNA
gcgctgtttgtttagttttagagctaccttcccgacttccgtaggagcgcttttttttcagccaactccaattttttttgcgctcctacggaagtcgggaagg

SEQ ID NO: 386 - DNA, 104 bp, synthetic construct
  source 1..104: mol_type = other DNA
gccgcacccatccaggttttagagctaccttcccgacttccgtaggagcgcttttttttcagccaactccaattttttttgcgctcctacggaagtcgggaagg

SEQ ID NO: 387 - DNA, 103 bp, synthetic construct
  source 1..103: mol_type = other DNA
gcgagtccacccgggttttagagctaccttcccgacttccgtaggagcgcttttttttcagccaactccaattttttttgcgctcctacggaagtcgggaagg

SEQ ID NO: 388 - DNA, 103 bp, synthetic construct
  source 1..103: mol_type = other DNA
gagcagctgggcgcgttttagagctaccttcccgacttccgtaggagcgcttttttttcagccaactccaattttttttgcgctcctacggaagtcgggaagg

SEQ ID NO: 389 - DNA, 103 bp, synthetic construct
  source 1..103: mol_type = other DNA
gcgctgtttgtttagttttagagctacctgaaggtaaagatcgggtcctcttttttttcagccaactccaattttttttgaggacccgatctttaccttcagg

SEQ ID NO: 390 - DNA, 104 bp, synthetic construct
  source 1..104: mol_type = other DNA
gccgcacccatccaggttttagagctacctgaaggtaaagatcgggtcctcttttttttcagccaactccaattttttttgaggacccgatctttaccttcagg

SEQ ID NO: 391 - DNA, 103 bp, synthetic construct
  source 1..103: mol_type = other DNA
gcgagtccacccgggttttagagctacctgaaggtaaagatcgggtcctcttttttttcagccaactccaattttttttgaggacccgatctttaccttcagg

SEQ ID NO: 392 - DNA, 103 bp, synthetic construct
  source 1..103: mol_type = other DNA
gagcagctgggcgcgttttagagctacctgaaggtaaagatcgggtcctcttttttttcagccaactccaattttttttgaggacccgatctttaccttcagg

SEQ ID NO: 393 - DNA, 101 bp, synthetic construct
  source 1..101: mol_type = other DNA
gcgctgtttgtttagttttagagctacctggttatagcggacgcactgtttttttttcagccaactccaattttttttacagtgcgtccgctataaccagg

SEQ ID NO: 394 - DNA, 102 bp, synthetic construct
  source 1..102: mol_type = other DNA
gccgcacccatccaggttttagagctacctggttatagcggacgcactgtttttttttcagccaactccaattttttttacagtgcgtccgctataaccagg

SEQ ID NO: 395 - DNA, 101 bp, synthetic construct
  source 1..101: mol_type = other DNA
gcgagtccacccgggttttagagctacctggttatagcggacgcactgtttttttttcagccaactccaattttttttacagtgcgtccgctataaccagg

SEQ ID NO: 396 - DNA, 101 bp, synthetic construct
  source 1..101: mol_type = other DNA
gagcagctgggcgcgttttagagctacctggttatagcggacgcactgtttttttttcagccaactccaattttttttacagtgcgtccgctataaccagg

SEQ ID NO: 397 - DNA, 101 bp, synthetic construct
  source 1..101: mol_type = other DNA
gcgctgtttgtttagttttagagctaccgcatcgtattatctgcgaagcttttttttcagccaactccaattttttttgcttcgcagataatacgatgcgg

SEQ ID NO: 398 - DNA, 102 bp, synthetic construct
  source 1..102: mol_type = other DNA
gccgcacccatccaggttttagagctaccgcatcgtattatctgcgaagcttttttttcagccaactccaattttttttgcttcgcagataatacgatgcgg

SEQ ID NO: 399 - DNA, 101 bp, synthetic construct
  source 1..101: mol_type = other DNA
gcgagtccacccgggttttagagctaccgcatcgtattatctgcgaagcttttttttcagccaactccaattttttttgcttcgcagataatacgatgcgg

SEQ ID NO: 400 - DNA, 101 bp, synthetic construct
  source 1..101: mol_type = other DNA
gagcagctgggcgcgttttagagctaccgcatcgtattatctgcgaagcttttttttcagccaactccaattttttttgcttcgcagataatacgatgcgg

SEQ ID NO: 401 - DNA, 101 bp, synthetic construct
  source 1..101: mol_type = other DNA
gcgctgtttgtttagttttagagctaccgctaggacgttcaacggagtcttttttttcagccaactccaattttttttgactccgttgaacgtcctagcgg

SEQ ID NO: 402 - DNA, 102 bp, synthetic construct
  source 1..102: mol_type = other DNA
gccgcacccatccaggttttagagctaccgctaggacgttcaacggagtcttttttttcagccaactccaattttttttgactccgttgaacgtcctagcgg

SEQ ID NO: 403 - DNA, 101 bp, synthetic construct
  source 1..101: mol_type = other DNA
gcgagtccacccgggttttagagctaccgctaggacgttcaacggagtcttttttttcagccaactccaattttttttgactccgttgaacgtcctagcgg

SEQ ID NO: 404 - DNA, 101 bp, synthetic construct
  source 1..101: mol_type = other DNA
gagcagctgggcgcgttttagagctaccgctaggacgttcaacggagtcttttttttcagccaactccaattttttttgactccgttgaacgtcctagcgg

SEQ ID NO: 405 - DNA, 101 bp, synthetic construct
  source 1..101: mol_type = other DNA
gcgctgtttgtttagttttagagctaccatagcggtactatcggcatctttttttttcagccaactccaattttttttagatgccgatagtaccgctatgg

SEQ ID NO: 406 - DNA, 102 bp, synthetic construct
  source 1..102: mol_type = other DNA
gccgcacccatccaggttttagagctaccatagcggtactatcggcatctttttttttcagccaactccaattttttttagatgccgatagtaccgctatgg

SEQ ID NO: 407 - DNA, 101 bp, synthetic construct
  source 1..101: mol_type = other DNA
gcgagtccacccgggttttagagctaccatagcggtactatcggcatctttttttttcagccaactccaattttttttagatgccgatagtaccgctatgg

SEQ ID NO: 408 - DNA, 101 bp, synthetic construct
  source 1..101: mol_type = other DNA
gagcagctgggcgcgttttagagctaccatagcggtactatcggcatctttttttttcagccaactccaattttttttagatgccgatagtaccgctatgg

SEQ ID NO: 409 - DNA, 101 bp, synthetic construct
  source 1..101: mol_type = other DNA
gcgctgtttgtttagttttagagctacctcgtactagtctcgcatgaccttttttttcagccaactccaattttttttggtcatgcgagactagtacgagg

SEQ ID NO: 410 - DNA, 102 bp, synthetic construct
  source 1..102: mol_type = other DNA
gccgcacccatccaggttttagagctacctcgtactagtctcgcatgaccttttttttcagccaactccaattttttttggtcatgcgagactagtacgagg

SEQ ID NO: 411 - DNA, 101 bp, synthetic construct
  source 1..101: mol_type = other DNA
gcgagtccacccgggttttagagctacctcgtactagtctcgcatgaccttttttttcagccaactccaattttttttggtcatgcgagactagtacgagg

SEQ ID NO: 412 - DNA, 101 bp, synthetic construct
  source 1..101: mol_type = other DNA
gagcagctgggcgcgttttagagctacctcgtactagtctcgcatgaccttttttttcagccaactccaattttttttggtcatgcgagactagtacgagg

SEQ ID NO: 413 - DNA, 101 bp, synthetic construct
  source 1..101: mol_type = other DNA
gcgctgtttgtttagttttagagctaccgatagtgctaaacgacgctttttttttttcagccaactccaattttttttaaagcgtcgtttagcactatcgg

SEQ ID NO: 414 - DNA, 102 bp, synthetic construct
  source 1..102: mol_type = other DNA
gccgcacccatccaggttttagagctaccgatagtgctaaacgacgctttttttttttcagccaactccaattttttttaaagcgtcgtttagcactatcgg

SEQ ID NO: 415 - DNA, 101 bp, synthetic construct
  source 1..101: mol_type = other DNA
gcgagtccacccgggttttagagctaccgatagtgctaaacgacgctttttttttttcagccaactccaattttttttaaagcgtcgtttagcactatcgg

SEQ ID NO: 416 - DNA, 101 bp, synthetic construct
  source 1..101: mol_type = other DNA
gagcagctgggcgcgttttagagctaccgatagtgctaaacgacgctttttttttttcagccaactccaattttttttaaagcgtcgtttagcactatcgg

SEQ ID NO: 417 - DNA, 101 bp, synthetic construct
  source 1..101: mol_type = other DNA
gcgctgtttgtttagttttagagctacccgttatcgacgttcaaggaacttttttttcagccaactccaattttttttgttccttgaacgtcgataacggg

SEQ ID NO: 418 - DNA, 102 bp, synthetic construct
  source 1..102: mol_type = other DNA
gccgcacccatccaggttttagagctacccgttatcgacgttcaaggaacttttttttcagccaactccaattttttttgttccttgaacgtcgataacggg

SEQ ID NO: 419 - DNA, 101 bp, synthetic construct
  source 1..101: mol_type = other DNA
gcgagtccacccgggttttagagctacccgttatcgacgttcaaggaacttttttttcagccaactccaattttttttgttccttgaacgtcgataacggg

SEQ ID NO: 420 - DNA, 101 bp, synthetic construct
  source 1..101: mol_type = other DNA
gagcagctgggcgcgttttagagctacccgttatcgacgttcaaggaacttttttttcagccaactccaattttttttgttccttgaacgtcgataacggg

SEQ ID NO: 421 - DNA, 101 bp, synthetic construct
  source 1..101: mol_type = other DNA
gcgctgtttgtttagttttagagctaccgatcaatgcggtctgcgtaacttttttttcagccaactccaattttttttgttacgcagaccgcattgatcgg

SEQ ID NO: 422 - DNA, 102 bp, synthetic construct
  source 1..102: mol_type = other DNA
gccgcacccatccaggttttagagctaccgatcaatgcggtctgcgtaacttttttttcagccaactccaattttttttgttacgcagaccgcattgatcgg

SEQ ID NO: 423 - DNA, 101 bp, synthetic construct
  source 1..101: mol_type = other DNA
gcgagtccacccgggttttagagctaccgatcaatgcggtctgcgtaacttttttttcagccaactccaattttttttgttacgcagaccgcattgatcgg

SEQ ID NO: 424 - DNA, 101 bp, synthetic construct
  source 1..101: mol_type = other DNA
gagcagctgggcgcgttttagagctaccgatcaatgcggtctgcgtaacttttttttcagccaactccaattttttttgttacgcagaccgcattgatcgg

SEQ ID NO: 425 - DNA, 101 bp, synthetic construct
  source 1..101: mol_type = other DNA
gcgctgtttgtttagttttagagctacccttactcgcgatactctcgacttttttttcagccaactccaattttttttgtcgagagtatcgcgagtaaggg

SEQ ID NO: 426 - DNA, 102 bp, synthetic construct
  source 1..102: mol_type = other DNA
gccgcacccatccaggttttagagctacccttactcgcgatactctcgacttttttttcagccaactccaattttttttgtcgagagtatcgcgagtaaggg

SEQ ID NO: 427 - DNA, 101 bp, synthetic construct
  source 1..101: mol_type = other DNA
gcgagtccacccgggttttagagctacccttactcgcgatactctcgacttttttttcagccaactccaattttttttgtcgagagtatcgcgagtaaggg

SEQ ID NO: 428 - DNA, 101 bp, synthetic construct
  source 1..101: mol_type = other DNA
gagcagctgggcgcgttttagagctacccttactcgcgatactctcgacttttttttcagccaactccaattttttttgtcgagagtatcgcgagtaaggg

SEQ ID NO: 429 - DNA, 101 bp, synthetic construct
  source 1..101: mol_type = other DNA
gcgctgtttgtttagttttagagctaccgcggacggtaagcacggaatattttttttcagccaactccaatttttttttattccgtgcttaccgtccgcgg

SEQ ID NO: 430 - DNA, 102 bp, synthetic construct
  source 1..102: mol_type = other DNA
gccgcacccatccaggttttagagctaccgcggacggtaagcacggaatattttttttcagccaactccaatttttttttattccgtgcttaccgtccgcgg

SEQ ID NO: 431 - DNA, 101 bp, synthetic construct
  source 1..101: mol_type = other DNA
gcgagtccacccgggttttagagctaccgcggacggtaagcacggaatattttttttcagccaactccaatttttttttattccgtgcttaccgtccgcgg

SEQ ID NO: 432 - DNA, 101 bp, synthetic construct
  source 1..101: mol_type = other DNA
gagcagctgggcgcgttttagagctaccgcggacggtaagcacggaatattttttttcagccaactccaatttttttttattccgtgcttaccgtccgcgg

SEQ ID NO: 433 - DNA, 101 bp, synthetic construct
  source 1..101: mol_type = other DNA
gcgctgtttgtttagttttagagctacctatagtcacgaatcgtagggtttttttttcagccaactccaattttttttaccctacgattcgtgactatagg

SEQ ID NO: 434 - DNA, 102 bp, synthetic construct
  source 1..102: mol_type = other DNA
gccgcacccatccaggttttagagctacctatagtcacgaatcgtagggtttttttttcagccaactccaattttttttaccctacgattcgtgactatagg

SEQ ID NO: 435 - DNA, 101 bp, synthetic construct
  source 1..101: mol_type = other DNA
gcgagtccacccgggttttagagctacctatagtcacgaatcgtagggtttttttttcagccaactccaattttttttaccctacgattcgtgactatagg

SEQ ID NO: 436 - DNA, 101 bp, synthetic construct
  source 1..101: mol_type = other DNA
gagcagctgggcgcgttttagagctacctatagtcacgaatcgtagggtttttttttcagccaactccaattttttttaccctacgattcgtgactatagg

SEQ ID NO: 437 - DNA, 101 bp, synthetic construct
  source 1..101: mol_type = other DNA
gcgctgtttgtttagttttagagctacccgtcgtcacgtatgcgtagcattttttttcagccaactccaatttttttttgctacgcatacgtgacgacggg

SEQ ID NO: 438 - DNA, 102 bp, synthetic construct
  source 1..102: mol_type = other DNA
gccgcacccatccaggttttagagctacccgtcgtcacgtatgcgtagcattttttttcagccaactccaatttttttttgctacgcatacgtgacgacggg

SEQ ID NO: 439 - DNA, 101 bp, synthetic construct
  source 1..101: mol_type = other DNA
gcgagtccacccgggttttagagctacccgtcgtcacgtatgcgtagcattttttttcagccaactccaatttttttttgctacgcatacgtgacgacggg

SEQ ID NO: 440 - DNA, 101 bp, synthetic construct
  source 1..101: mol_type = other DNA
gagcagctgggcgcgttttagagctacccgtcgtcacgtatgcgtagcattttttttcagccaactccaatttttttttgctacgcatacgtgacgacggg

SEQ ID NO: 441 - DNA, 101 bp, synthetic construct
  source 1..101: mol_type = other DNA
gcgctgtttgtttagttttagagctacccgagaggtagtagacgacgcattttttttcagccaactccaatttttttttgcgtcgtctactacctctcggg

SEQ ID NO: 442 - DNA, 102 bp, synthetic construct
  source 1..102: mol_type = other DNA
gccgcacccatccaggttttagagctacccgagaggtagtagacgacgcattttttttcagccaactccaatttttttttgcgtcgtctactacctctcggg

SEQ ID NO: 443 - DNA, 101 bp, synthetic construct
  source 1..101: mol_type = other DNA
gcgagtccacccgggttttagagctacccgagaggtagtagacgacgcattttttttcagccaactccaatttttttttgcgtcgtctactacctctcggg

SEQ ID NO: 444 - DNA, 101 bp, synthetic construct
  source 1..101: mol_type = other DNA
gagcagctgggcgcgttttagagctacccgagaggtagtagacgacgcattttttttcagccaactccaatttttttttgcgtcgtctactacctctcggg

SEQ ID NO: 445 - DNA, 101 bp, synthetic construct
  source 1..101: mol_type = other DNA
gcgctgtttgtttagttttagagctaccgacgtctacggacgggagctattttttttcagccaactccaatttttttttagctcccgtccgtagacgtcgg

SEQ ID NO: 446 - DNA, 102 bp, synthetic construct
  source 1..102: mol_type = other DNA
gccgcacccatccaggttttagagctaccgacgtctacggacgggagctattttttttcagccaactccaatttttttttagctcccgtccgtagacgtcgg

SEQ ID NO: 447 - DNA, 101 bp, synthetic construct
  source 1..101: mol_type = other DNA
gcgagtccacccgggttttagagctaccgacgtctacggacgggagctattttttttcagccaactccaatttttttttagctcccgtccgtagacgtcgg

SEQ ID NO: 448 - DNA, 101 bp, synthetic construct
  source 1..101: mol_type = other DNA
gagcagctgggcgcgttttagagctaccgacgtctacggacgggagctattttttttcagccaactccaatttttttttagctcccgtccgtagacgtcgg

SEQ ID NO: 449 - DNA, 101 bp, synthetic construct
  source 1..101: mol_type = other DNA
gcgctgtttgtttagttttagagctaccaaagctcattcgcgactgagcttttttttcagccaactccaattttttttgctcagtcgcgaatgagctttgg

SEQ ID NO: 450 - DNA, 102 bp, synthetic construct
  source 1..102: mol_type = other DNA
gccgcacccatccaggttttagagctaccaaagctcattcgcgactgagcttttttttcagccaactccaattttttttgctcagtcgcgaatgagctttgg

SEQ ID NO: 451 - DNA, 101 bp, synthetic construct
  source 1..101: mol_type = other DNA
gcgagtccacccgggttttagagctaccaaagctcattcgcgactgagcttttttttcagccaactccaattttttttgctcagtcgcgaatgagctttgg

SEQ ID NO: 452 - DNA, 101 bp, synthetic construct
  source 1..101: mol_type = other DNA
gagcagctgggcgcgttttagagctaccaaagctcattcgcgactgagcttttttttcagccaactccaattttttttgctcagtcgcgaatgagctttgg

SEQ ID NO: 453 - DNA, 101 bp, synthetic construct
  source 1..101: mol_type = other DNA
gcgctgtttgtttagttttagagctaccatggcacgatcgacacggaggttttttttcagccaactccaattttttttcctccgtgtcgatcgtgccatgg

SEQ ID NO: 454 - DNA, 102 bp, synthetic construct
  source 1..102: mol_type = other DNA
gccgcacccatccaggttttagagctaccatggcacgatcgacacggaggttttttttcagccaactccaattttttttcctccgtgtcgatcgtgccatgg

SEQ ID NO: 455 - DNA, 101 bp, synthetic construct
  source 1..101: mol_type = other DNA
gcgagtccacccgggttttagagctaccatggcacgatcgacacggaggttttttttcagccaactccaattttttttcctccgtgtcgatcgtgccatgg

SEQ ID NO: 456 - DNA, 101 bp, synthetic construct
  source 1..101: mol_type = other DNA
gagcagctgggcgcgttttagagctaccatggcacgatcgacacggaggttttttttcagccaactccaattttttttcctccgtgtcgatcgtgccatgg

SEQ ID NO: 457 - DNA, 101 bp, synthetic construct
  source 1..101: mol_type = other DNA
gcgctgtttgtttagttttagagctacccgaactctctatcgaacgagtttttttttcagccaactccaattttttttactcgttcgatagagagttcggg

SEQ ID NO: 458 - DNA, 102 bp, synthetic construct
  source 1..102: mol_type = other DNA
gccgcacccatccaggttttagagctacccgaactctctatcgaacgagtttttttttcagccaactccaattttttttactcgttcgatagagagttcggg

SEQ ID NO: 459 - DNA, 101 bp, synthetic construct
  source 1..101: mol_type = other DNA
gcgagtccacccgggttttagagctacccgaactctctatcgaacgagtttttttttcagccaactccaattttttttactcgttcgatagagagttcggg

SEQ ID NO: 460 - DNA, 101 bp, synthetic construct
  source 1..101: mol_type = other DNA
gagcagctgggcgcgttttagagctacccgaactctctatcgaacgagtttttttttcagccaactccaattttttttactcgttcgatagagagttcggg

SEQ ID NO: 461 - DNA, 104 bp, synthetic construct
  source 1..104: mol_type = other DNA
gagaccttagagaccgttttagagctaccgtcgttgtaccgtctacttgacttttttttcagccaactccaattttttttgtcaagtagacggtacaacgacgg

SEQ ID NO: 462 - DNA, 103 bp, synthetic construct
  source 1..103: mol_type = other DNA
gctacgtaatttcagttttagagctaccgtcgttgtaccgtctacttgacttttttttcagccaactccaattttttttgtcaagtagacggtacaacgacgg

SEQ ID NO: 463 - DNA, 104 bp, synthetic construct
  source 1..104: mol_type = other DNA
gttgaaagtagaagggttttagagctaccgtcgttgtaccgtctacttgacttttttttcagccaactccaattttttttgtcaagtagacggtacaacgacgg

SEQ ID NO: 464 - DNA, 104 bp, synthetic construct
  source 1..104: mol_type = other DNA
gttcttacaagtcttgttttagagctaccgtcgttgtaccgtctacttgacttttttttcagccaactccaattttttttgtcaagtagacggtacaacgacgg

SEQ ID NO: 465 - DNA, 102 bp, synthetic construct
  source 1..102: mol_type = other DNA
gagaccttagagaccgttttagagctacctacactcgacatcggtagctattttttttcagccaactccaatttttttttagctaccgatgtcgagtgtagg

SEQ ID NO: 466 - DNA, 101 bp, synthetic construct
  source 1..101: mol_type = other DNA
gctacgtaatttcagttttagagctacctacactcgacatcggtagctattttttttcagccaactccaatttttttttagctaccgatgtcgagtgtagg

SEQ ID NO: 467 - DNA, 102 bp, synthetic construct
  source 1..102: mol_type = other DNA
gttgaaagtagaagggttttagagctacctacactcgacatcggtagctattttttttcagccaactccaatttttttttagctaccgatgtcgagtgtagg

SEQ ID NO: 468 - DNA, 102 bp, synthetic construct
  source 1..102: mol_type = other DNA
gttcttacaagtcttgttttagagctacctacactcgacatcggtagctattttttttcagccaactccaatttttttttagctaccgatgtcgagtgtagg

SEQ ID NO: 469 - DNA, 102 bp, synthetic construct
  source 1..102: mol_type = other DNA
gagaccttagagaccgttttagagctaccctggcggaacgttcgagtaatttttttttcagccaactccaattttttttattactcgaacgttccgccaggg

SEQ ID NO: 470 - DNA, 101 bp, synthetic construct
  source 1..101: mol_type = other DNA
gctacgtaatttcagttttagagctaccctggcggaacgttcgagtaatttttttttcagccaactccaattttttttattactcgaacgttccgccaggg

SEQ ID NO: 471 - DNA, 102 bp, synthetic construct
  source 1..102: mol_type = other DNA
gttgaaagtagaagggttttagagctaccctggcggaacgttcgagtaatttttttttcagccaactccaattttttttattactcgaacgttccgccaggg

SEQ ID NO: 472 - DNA, 102 bp, synthetic construct
  source 1..102: mol_type = other DNA
gttcttacaagtcttgttttagagctaccctggcggaacgttcgagtaatttttttttcagccaactccaattttttttattactcgaacgttccgccaggg

SEQ ID NO: 473 - DNA, 102 bp, synthetic construct
  source 1..102: mol_type = other DNA
gagaccttagagaccgttttagagctacctacacgatagtggtcgtgcgcttttttttcagccaactccaattttttttgcgcacgaccactatcgtgtagg

SEQ ID NO: 474 - DNA, 101 bp, synthetic construct
  source 1..101: mol_type = other DNA
gctacgtaatttcagttttagagctacctacacgatagtggtcgtgcgcttttttttcagccaactccaattttttttgcgcacgaccactatcgtgtagg

SEQ ID NO: 475 - DNA, 102 bp, synthetic construct
  source 1..102: mol_type = other DNA
gttgaaagtagaagggttttagagctacctacacgatagtggtcgtgcgcttttttttcagccaactccaattttttttgcgcacgaccactatcgtgtagg

SEQ ID NO: 476 - DNA, 102 bp, synthetic construct
  source 1..102: mol_type = other DNA
gttcttacaagtcttgttttagagctacctacacgatagtggtcgtgcgcttttttttcagccaactccaattttttttgcgcacgaccactatcgtgtagg

SEQ ID NO: 477 - DNA, 104 bp, synthetic construct
  source 1..104: mol_type = other DNA
gagaccttagagaccgttttagagctaccttcccgacttccgtaggagcgcttttttttcagccaactccaattttttttgcgctcctacggaagtcgggaagg

SEQ ID NO: 478 - DNA, 103 bp, synthetic construct
  source 1..103: mol_type = other DNA
gctacgtaatttcagttttagagctaccttcccgacttccgtaggagcgcttttttttcagccaactccaattttttttgcgctcctacggaagtcgggaagg

SEQ ID NO: 479 - DNA, 104 bp, synthetic construct
  source 1..104: mol_type = other DNA
gttgaaagtagaagggttttagagctaccttcccgacttccgtaggagcgcttttttttcagccaactccaattttttttgcgctcctacggaagtcgggaagg

SEQ ID NO: 480 - DNA, 104 bp, synthetic construct
  source 1..104: mol_type = other DNA
gttcttacaagtcttgttttagagctaccttcccgacttccgtaggagcgcttttttttcagccaactccaattttttttgcgctcctacggaagtcgggaagg

SEQ ID NO: 481 - DNA, 104 bp, synthetic construct
  source 1..104: mol_type = other DNA
gagaccttagagaccgttttagagctacctgaaggtaaagatcgggtcctcttttttttcagccaactccaattttttttgaggacccgatctttaccttcagg

SEQ ID NO: 482 - DNA, 103 bp, synthetic construct
  source 1..103: mol_type = other DNA
gctacgtaatttcagttttagagctacctgaaggtaaagatcgggtcctcttttttttcagccaactccaattttttttgaggacccgatctttaccttcagg

SEQ ID NO: 483 - DNA, 104 bp, synthetic construct
  source 1..104: mol_type = other DNA
gttgaaagtagaagggttttagagctacctgaaggtaaagatcgggtcctcttttttttcagccaactccaattttttttgaggacccgatctttaccttcagg

SEQ ID NO: 484 - DNA, 104 bp, synthetic construct
  source 1..104: mol_type = other DNA
gttcttacaagtcttgttttagagctacctgaaggtaaagatcgggtcctcttttttttcagccaactccaattttttttgaggacccgatctttaccttcagg

SEQ ID NO: 485 - DNA, 102 bp, synthetic construct
  source 1..102: mol_type = other DNA
gagaccttagagaccgttttagagctacctggttatagcggacgcactgtttttttttcagccaactccaattttttttacagtgcgtccgctataaccagg

SEQ ID NO: 486 - DNA, 101 bp, synthetic construct
  source 1..101: mol_type = other DNA
gctacgtaatttcagttttagagctacctggttatagcggacgcactgtttttttttcagccaactccaattttttttacagtgcgtccgctataaccagg

SEQ ID NO: 487 - DNA, 102 bp, synthetic construct
  source 1..102: mol_type = other DNA
gttgaaagtagaagggttttagagctacctggttatagcggacgcactgtttttttttcagccaactccaattttttttacagtgcgtccgctataaccagg

SEQ ID NO: 488 - DNA, 102 bp, synthetic construct
  source 1..102: mol_type = other DNA
gttcttacaagtcttgttttagagctacctggttatagcggacgcactgtttttttttcagccaactccaattttttttacagtgcgtccgctataaccagg

SEQ ID NO: 489 - DNA, 102 bp, synthetic construct
  source 1..102: mol_type = other DNA
gagaccttagagaccgttttagagctaccgcatcgtattatctgcgaagcttttttttcagccaactccaattttttttgcttcgcagataatacgatgcgg

SEQ ID NO: 490 - DNA, 101 bp, synthetic construct
  source 1..101: mol_type = other DNA
gctacgtaatttcagttttagagctaccgcatcgtattatctgcgaagcttttttttcagccaactccaattttttttgcttcgcagataatacgatgcgg

SEQ ID NO: 491 - DNA, 102 bp, synthetic construct
  source 1..102: mol_type = other DNA
gttgaaagtagaagggttttagagctaccgcatcgtattatctgcgaagcttttttttcagccaactccaattttttttgcttcgcagataatacgatgcgg

SEQ ID NO: 492 - DNA, 102 bp, synthetic construct
  source 1..102: mol_type = other DNA
gttcttacaagtcttgttttagagctaccgcatcgtattatctgcgaagcttttttttcagccaactccaattttttttgcttcgcagataatacgatgcgg

SEQ ID NO: 493 - DNA, 102 bp, synthetic construct
  source 1..102: mol_type = other DNA
gagaccttagagaccgttttagagctaccgctaggacgttcaacggagtcttttttttcagccaactccaattttttttgactccgttgaacgtcctagcgg

SEQ ID NO: 494 - DNA, 101 bp, synthetic construct
  source 1..101: mol_type = other DNA
gctacgtaatttcagttttagagctaccgctaggacgttcaacggagtcttttttttcagccaactccaattttttttgactccgttgaacgtcctagcgg

SEQ ID NO: 495 - DNA, 102 bp, synthetic construct
  source 1..102: mol_type = other DNA
gttgaaagtagaagggttttagagctaccgctaggacgttcaacggagtcttttttttcagccaactccaattttttttgactccgttgaacgtcctagcgg

SEQ ID NO: 496 - DNA, 102 bp, synthetic construct
  source 1..102: mol_type = other DNA
gttcttacaagtcttgttttagagctaccgctaggacgttcaacggagtcttttttttcagccaactccaattttttttgactccgttgaacgtcctagcgg

SEQ ID NO: 497 - DNA, 102 bp, synthetic construct
  source 1..102: mol_type = other DNA
gagaccttagagaccgttttagagctaccatagcggtactatcggcatctttttttttcagccaactccaattttttttagatgccgatagtaccgctatgg

SEQ ID NO: 498 - DNA, 101 bp, synthetic construct
  source 1..101: mol_type = other DNA
gctacgtaatttcagttttagagctaccatagcggtactatcggcatctttttttttcagccaactccaattttttttagatgccgatagtaccgctatgg

SEQ ID NO: 499 - DNA, 102 bp, synthetic construct
  source 1..102: mol_type = other DNA
gttgaaagtagaagggttttagagctaccatagcggtactatcggcatctttttttttcagccaactccaattttttttagatgccgatagtaccgctatgg

SEQ ID NO: 500 - DNA, 102 bp, synthetic construct
  source 1..102: mol_type = other DNA
gttcttacaagtcttgttttagagctaccatagcggtactatcggcatctttttttttcagccaactccaattttttttagatgccgatagtaccgctatgg

SEQ ID NO: 501 - DNA, 102 bp, synthetic construct
  source 1..102: mol_type = other DNA
gagaccttagagaccgttttagagctacctcgtactagtctcgcatgaccttttttttcagccaactccaattttttttggtcatgcgagactagtacgagg

SEQ ID NO: 502 - DNA, 101 bp, synthetic construct
  source 1..101: mol_type = other DNA
gctacgtaatttcagttttagagctacctcgtactagtctcgcatgaccttttttttcagccaactccaattttttttggtcatgcgagactagtacgagg

SEQ ID NO: 503 - DNA, 102 bp, synthetic construct
  source 1..102: mol_type = other DNA
gttgaaagtagaagggttttagagctacctcgtactagtctcgcatgaccttttttttcagccaactccaattttttttggtcatgcgagactagtacgagg

SEQ ID NO: 504 - DNA, 102 bp, synthetic construct
  source 1..102: mol_type = other DNA
gttcttacaagtcttgttttagagctacctcgtactagtctcgcatgaccttttttttcagccaactccaattttttttggtcatgcgagactagtacgagg

SEQ ID NO: 505 - DNA, 102 bp, synthetic construct
  source 1..102: mol_type = other DNA
gagaccttagagaccgttttagagctaccgatagtgctaaacgacgctttttttttttcagccaactccaattttttttaaagcgtcgtttagcactatcgg

SEQ ID NO: 506 - DNA, 101 bp, synthetic construct
  source 1..101: mol_type = other DNA
gctacgtaatttcagttttagagctaccgatagtgctaaacgacgctttttttttttcagccaactccaattttttttaaagcgtcgtttagcactatcgg

SEQ ID NO: 507 - DNA, 102 bp, synthetic construct
  source 1..102: mol_type = other DNA
gttgaaagtagaagggttttagagctaccgatagtgctaaacgacgctttttttttttcagccaactccaattttttttaaagcgtcgtttagcactatcgg

SEQ ID NO: 508 - DNA, 102 bp, synthetic construct
  source 1..102: mol_type = other DNA
gttcttacaagtcttgttttagagctaccgatagtgctaaacgacgctttttttttttcagccaactccaattttttttaaagcgtcgtttagcactatcgg

SEQ ID NO: 509 - DNA, 102 bp, synthetic construct
  source 1..102: mol_type = other DNA
gagaccttagagaccgttttagagctacccgttatcgacgttcaaggaacttttttttcagccaactccaattttttttgttccttgaacgtcgataacggg

SEQ ID NO: 510 - DNA, 101 bp, synthetic construct
  source 1..101: mol_type = other DNA
gctacgtaatttcagttttagagctacccgttatcgacgttcaaggaacttttttttcagccaactccaattttttttgttccttgaacgtcgataacggg

SEQ ID NO: 511 - DNA, 102 bp, synthetic construct
  source 1..102: mol_type = other DNA
gttgaaagtagaagggttttagagctacccgttatcgacgttcaaggaacttttttttcagccaactccaattttttttgttccttgaacgtcgataacggg

SEQ ID NO: 512 - DNA, 102 bp, synthetic construct
  source 1..102: mol_type = other DNA
gttcttacaagtcttgttttagagctacccgttatcgacgttcaaggaacttttttttcagccaactccaattttttttgttccttgaacgtcgataacggg

SEQ ID NO: 513 - DNA, 102 bp, synthetic construct
  source 1..102: mol_type = other DNA
gagaccttagagaccgttttagagctaccgatcaatgcggtctgcgtaacttttttttcagccaactccaattttttttgttacgcagaccgcattgatcgg

SEQ ID NO: 514 - DNA, 101 bp, synthetic construct
  source 1..101: mol_type = other DNA
gctacgtaatttcagttttagagctaccgatcaatgcggtctgcgtaacttttttttcagccaactccaattttttttgttacgcagaccgcattgatcgg

SEQ ID NO: 515 - DNA, 102 bp, synthetic construct
  source 1..102: mol_type = other DNA
gttgaaagtagaagggttttagagctaccgatcaatgcggtctgcgtaacttttttttcagccaactccaattttttttgttacgcagaccgcattgatcgg

SEQ ID NO: 516 - DNA, 102 bp, synthetic construct
  source 1..102: mol_type = other DNA
gttcttacaagtcttgttttagagctaccgatcaatgcggtctgcgtaacttttttttcagccaactccaattttttttgttacgcagaccgcattgatcgg

SEQ ID NO: 517 - DNA, 102 bp, synthetic construct
  source 1..102: mol_type = other DNA
gagaccttagagaccgttttagagctacccttactcgcgatactctcgacttttttttcagccaactccaattttttttgtcgagagtatcgcgagtaaggg

SEQ ID NO: 518 - DNA, 101 bp, synthetic construct
  source 1..101: mol_type = other DNA
gctacgtaatttcagttttagagctacccttactcgcgatactctcgacttttttttcagccaactccaattttttttgtcgagagtatcgcgagtaaggg

SEQ ID NO: 519 - DNA, 102 bp, synthetic construct
  source 1..102: mol_type = other DNA
gttgaaagtagaagggttttagagctacccttactcgcgatactctcgacttttttttcagccaactccaattttttttgtcgagagtatcgcgagtaaggg

SEQ ID NO: 520 - DNA, 102 bp, synthetic construct
  source 1..102: mol_type = other DNA
gttcttacaagtcttgttttagagctacccttactcgcgatactctcgacttttttttcagccaactccaattttttttgtcgagagtatcgcgagtaaggg

SEQ ID NO: 521 - DNA, 102 bp, synthetic construct
  source 1..102: mol_type = other DNA
gagaccttagagaccgttttagagctaccgcggacggtaagcacggaatattttttttcagccaactccaatttttttttattccgtgcttaccgtccgcgg

SEQ ID NO: 522 - DNA, 101 bp, synthetic construct
  source 1..101: mol_type = other DNA
gctacgtaatttcagttttagagctaccgcggacggtaagcacggaatattttttttcagccaactccaatttttttttattccgtgcttaccgtccgcgg

SEQ ID NO: 523 - DNA, 102 bp, synthetic construct
  source 1..102: mol_type = other DNA
gttgaaagtagaagggttttagagctaccgcggacggtaagcacggaatattttttttcagccaactccaatttttttttattccgtgcttaccgtccgcgg

SEQ ID NO: 524 - DNA, 102 bp, synthetic construct
  source 1..102: mol_type = other DNA
gttcttacaagtcttgttttagagctaccgcggacggtaagcacggaatattttttttcagccaactccaatttttttttattccgtgcttaccgtccgcgg

SEQ ID NO: 525 - DNA, 102 bp, synthetic construct
  source 1..102: mol_type = other DNA
gagaccttagagaccgttttagagctacctatagtcacgaatcgtagggtttttttttcagccaactccaattttttttaccctacgattcgtgactatagg

SEQ ID NO: 526 - DNA, 101 bp, synthetic construct
  source 1..101: mol_type = other DNA
gctacgtaatttcagttttagagctacctatagtcacgaatcgtagggtttttttttcagccaactccaattttttttaccctacgattcgtgactatagg

SEQ ID NO: 527 - DNA, 102 bp, synthetic construct
  source 1..102: mol_type = other DNA
gttgaaagtagaagggttttagagctacctatagtcacgaatcgtagggtttttttttcagccaactccaattttttttaccctacgattcgtgactatagg

SEQ ID NO: 528 - DNA, 102 bp, synthetic construct
  source 1..102: mol_type = other DNA
gttcttacaagtcttgttttagagctacctatagtcacgaatcgtagggtttttttttcagccaactccaattttttttaccctacgattcgtgactatagg

SEQ ID NO: 529 - DNA, 102 bp, synthetic construct
  source 1..102: mol_type = other DNA
gagaccttagagaccgttttagagctacccgtcgtcacgtatgcgtagcattttttttcagccaactccaatttttttttgctacgcatacgtgacgacggg

SEQ ID NO: 530 - DNA, 101 bp, synthetic construct
  source 1..101: mol_type = other DNA
gctacgtaatttcagttttagagctacccgtcgtcacgtatgcgtagcattttttttcagccaactccaatttttttttgctacgcatacgtgacgacggg

SEQ ID NO: 531 - DNA, 102 bp, synthetic construct
  source 1..102: mol_type = other DNA
gttgaaagtagaagggttttagagctacccgtcgtcacgtatgcgtagcattttttttcagccaactccaatttttttttgctacgcatacgtgacgacggg

SEQ ID NO: 532 - DNA, 102 bp, synthetic construct
  source 1..102: mol_type = other DNA
gttcttacaagtcttgttttagagctacccgtcgtcacgtatgcgtagcattttttttcagccaactccaatttttttttgctacgcatacgtgacgacggg

SEQ ID NO: 533 - DNA, 102 bp, synthetic construct
  source 1..102: mol_type = other DNA
gagaccttagagaccgttttagagctacccgagaggtagtagacgacgcattttttttcagccaactccaatttttttttgcgtcgtctactacctctcggg

SEQ ID NO: 534 - DNA, 101 bp, synthetic construct
  source 1..101: mol_type = other DNA
gctacgtaatttcagttttagagctacccgagaggtagtagacgacgcattttttttcagccaactccaatttttttttgcgtcgtctactacctctcggg

SEQ ID NO: 535 - DNA, 102 bp, synthetic construct
  source 1..102: mol_type = other DNA
gttgaaagtagaagggttttagagctacccgagaggtagtagacgacgcattttttttcagccaactccaatttttttttgcgtcgtctactacctctcggg

SEQ ID NO: 536 - DNA, 102 bp, synthetic construct
  source 1..102: mol_type = other DNA
gttcttacaagtcttgttttagagctacccgagaggtagtagacgacgcattttttttcagccaactccaatttttttttgcgtcgtctactacctctcggg

SEQ ID NO: 537 - DNA, 102 bp, synthetic construct
  source 1..102: mol_type = other DNA
gagaccttagagaccgttttagagctaccgacgtctacggacgggagctattttttttcagccaactccaatttttttttagctcccgtccgtagacgtcgg

SEQ ID NO: 538 - DNA, 101 bp, synthetic construct
  source 1..101: mol_type = other DNA
gctacgtaatttcagttttagagctaccgacgtctacggacgggagctattttttttcagccaactccaatttttttttagctcccgtccgtagacgtcgg

SEQ ID NO: 539 - DNA, 102 bp, synthetic construct
  source 1..102: mol_type = other DNA
gttgaaagtagaagggttttagagctaccgacgtctacggacgggagctattttttttcagccaactccaatttttttttagctcccgtccgtagacgtcgg

SEQ ID NO: 540 - DNA, 102 bp, synthetic construct
  source 1..102: mol_type = other DNA
gttcttacaagtcttgttttagagctaccgacgtctacggacgggagctattttttttcagccaactccaatttttttttagctcccgtccgtagacgtcgg

SEQ ID NO: 541 - DNA, 102 bp, synthetic construct
  source 1..102: mol_type = other DNA
gagaccttagagaccgttttagagctaccaaagctcattcgcgactgagcttttttttcagccaactccaattttttttgctcagtcgcgaatgagctttgg

SEQ ID NO: 542 - DNA, 101 bp, synthetic construct
  source 1..101: mol_type = other DNA
gctacgtaatttcagttttagagctaccaaagctcattcgcgactgagcttttttttcagccaactccaattttttttgctcagtcgcgaatgagctttgg

SEQ ID NO: 543 - DNA, 102 bp, synthetic construct
  source 1..102: mol_type = other DNA
gttgaaagtagaagggttttagagctaccaaagctcattcgcgactgagcttttttttcagccaactccaattttttttgctcagtcgcgaatgagctttgg

SEQ ID NO: 544 - DNA, 102 bp, synthetic construct
  source 1..102: mol_type = other DNA
gttcttacaagtcttgttttagagctaccaaagctcattcgcgactgagcttttttttcagccaactccaattttttttgctcagtcgcgaatgagctttgg

SEQ ID NO: 545 - DNA, 102 bp, synthetic construct
  source 1..102: mol_type = other DNA
gagaccttagagaccgttttagagctaccatggcacgatcgacacggaggttttttttcagccaactccaattttttttcctccgtgtcgatcgtgccatgg

SEQ ID NO: 546 - DNA, 101 bp, synthetic construct
  source 1..101: mol_type = other DNA
gctacgtaatttcagttttagagctaccatggcacgatcgacacggaggttttttttcagccaactccaattttttttcctccgtgtcgatcgtgccatgg

SEQ ID NO: 547 - DNA, 102 bp, synthetic construct
  source 1..102: mol_type = other DNA
gttgaaagtagaagggttttagagctaccatggcacgatcgacacggaggttttttttcagccaactccaattttttttcctccgtgtcgatcgtgccatgg

SEQ ID NO: 548 - DNA, 102 bp, synthetic construct
  source 1..102: mol_type = other DNA
gttcttacaagtcttgttttagagctaccatggcacgatcgacacggaggttttttttcagccaactccaattttttttcctccgtgtcgatcgtgccatgg

SEQ ID NO: 549 - DNA, 102 bp, synthetic construct
  source 1..102: mol_type = other DNA
gagaccttagagaccgttttagagctacccgaactctctatcgaacgagtttttttttcagccaactccaattttttttactcgttcgatagagagttcggg

SEQ ID NO: 550 - DNA, 101 bp, synthetic construct
  source 1..101: mol_type = other DNA
gctacgtaatttcagttttagagctacccgaactctctatcgaacgagtttttttttcagccaactccaattttttttactcgttcgatagagagttcggg

SEQ ID NO: 551 - DNA, 102 bp, synthetic construct
  source 1..102: mol_type = other DNA
gttgaaagtagaagggttttagagctacccgaactctctatcgaacgagtttttttttcagccaactccaattttttttactcgttcgatagagagttcggg

SEQ ID NO: 552 - DNA, 102 bp, synthetic construct
  source 1..102: mol_type = other DNA
gttcttacaagtcttgttttagagctacccgaactctctatcgaacgagtttttttttcagccaactccaattttttttactcgttcgatagagagttcggg

SEQ ID NO: 553 - DNA, 104 bp, synthetic construct
  source 1..104: mol_type = other DNA
gatgggccaggcggcgttttagagctaccgtcgttgtaccgtctacttgacttttttttcagccaactccaattttttttgtcaagtagacggtacaacgacgg

SEQ ID NO: 554 - DNA, 104 bp, synthetic construct
  source 1..104: mol_type = other DNA
gacccgctggtcctggttttagagctaccgtcgttgtaccgtctacttgacttttttttcagccaactccaattttttttgtcaagtagacggtacaacgacgg

SEQ ID NO: 555 - DNA, 104 bp, synthetic construct
  source 1..104: mol_type = other DNA
gtcgtgaagcatgtggttttagagctaccgtcgttgtaccgtctacttgacttttttttcagccaactccaattttttttgtcaagtagacggtacaacgacgg

SEQ ID NO: 556 - DNA, 104 bp, synthetic construct
  source 1..104: mol_type = other DNA
gcagcaccagggaaagttttagagctaccgtcgttgtaccgtctacttgacttttttttcagccaactccaattttttttgtcaagtagacggtacaacgacgg

SEQ ID NO: 557 - DNA, 102 bp, synthetic construct
  source 1..102: mol_type = other DNA
gatgggccaggcggcgttttagagctacctacactcgacatcggtagctattttttttcagccaactccaatttttttttagctaccgatgtcgagtgtagg

SEQ ID NO: 558 - DNA, 102 bp, synthetic construct
  source 1..102: mol_type = other DNA
gacccgctggtcctggttttagagctacctacactcgacatcggtagctattttttttcagccaactccaatttttttttagctaccgatgtcgagtgtagg

SEQ ID NO: 559 - DNA, 102 bp, synthetic construct
  source 1..102: mol_type = other DNA
gtcgtgaagcatgtggttttagagctacctacactcgacatcggtagctattttttttcagccaactccaatttttttttagctaccgatgtcgagtgtagg

SEQ ID NO: 560 - DNA, 102 bp, synthetic construct
  source 1..102: mol_type = other DNA
gcagcaccagggaaagttttagagctacctacactcgacatcggtagctattttttttcagccaactccaatttttttttagctaccgatgtcgagtgtagg

SEQ ID NO: 561 - DNA, 102 bp, synthetic construct
  source 1..102: mol_type = other DNA
gatgggccaggcggcgttttagagctaccctggcggaacgttcgagtaatttttttttcagccaactccaattttttttattactcgaacgttccgccaggg

SEQ ID NO: 562 - DNA, 102 bp, synthetic construct
  source 1..102: mol_type = other DNA
gacccgctggtcctggttttagagctaccctggcggaacgttcgagtaatttttttttcagccaactccaattttttttattactcgaacgttccgccaggg

SEQ ID NO: 563 - DNA, 102 bp, synthetic construct
  source 1..102: mol_type = other DNA
gtcgtgaagcatgtggttttagagctaccctggcggaacgttcgagtaatttttttttcagccaactccaattttttttattactcgaacgttccgccaggg

SEQ ID NO: 564 - DNA, 102 bp, synthetic construct
  source 1..102: mol_type = other DNA
gcagcaccagggaaagttttagagctaccctggcggaacgttcgagtaatttttttttcagccaactccaattttttttattactcgaacgttccgccaggg

SEQ ID NO: 565 - DNA, 102 bp, synthetic construct
  source 1..102: mol_type = other DNA
gatgggccaggcggcgttttagagctacctacacgatagtggtcgtgcgcttttttttcagccaactccaattttttttgcgcacgaccactatcgtgtagg

SEQ ID NO: 566 - DNA, 102 bp, synthetic construct
  source 1..102: mol_type = other DNA
gacccgctggtcctggttttagagctacctacacgatagtggtcgtgcgcttttttttcagccaactccaattttttttgcgcacgaccactatcgtgtagg

SEQ ID NO: 567 - DNA, 102 bp, synthetic construct
  source 1..102: mol_type = other DNA
gtcgtgaagcatgtggttttagagctacctacacgatagtggtcgtgcgcttttttttcagccaactccaattttttttgcgcacgaccactatcgtgtagg

SEQ ID NO: 568 - DNA, 102 bp, synthetic construct
  source 1..102: mol_type = other DNA
gcagcaccagggaaagttttagagctacctacacgatagtggtcgtgcgcttttttttcagccaactccaattttttttgcgcacgaccactatcgtgtagg

SEQ ID NO: 569 - DNA, 104 bp, synthetic construct
  source 1..104: mol_type = other DNA
gatgggccaggcggcgttttagagctaccttcccgacttccgtaggagcgcttttttttcagccaactccaattttttttgcgctcctacggaagtcgggaagg

SEQ ID NO: 570 - DNA, 104 bp, synthetic construct
  source 1..104: mol_type = other DNA
gacccgctggtcctggttttagagctaccttcccgacttccgtaggagcgcttttttttcagccaactccaattttttttgcgctcctacggaagtcgggaagg

SEQ ID NO: 571 - DNA, 104 bp, synthetic construct
  source 1..104: mol_type = other DNA
gtcgtgaagcatgtggttttagagctaccttcccgacttccgtaggagcgcttttttttcagccaactccaattttttttgcgctcctacggaagtcgggaagg

SEQ ID NO: 572 - DNA, 104 bp, synthetic construct
  source 1..104: mol_type = other DNA
gcagcaccagggaaagttttagagctaccttcccgacttccgtaggagcgcttttttttcagccaactccaattttttttgcgctcctacggaagtcgggaagg

SEQ ID NO: 573 - DNA, 104 bp, synthetic construct
  source 1..104: mol_type = other DNA
gatgggccaggcggcgttttagagctacctgaaggtaaagatcgggtcctcttttttttcagccaactccaattttttttgaggacccgatctttaccttcagg

SEQ ID NO: 574 - DNA, 104 bp, synthetic construct
  source 1..104: mol_type = other DNA
gacccgctggtcctggttttagagctacctgaaggtaaagatcgggtcctcttttttttcagccaactccaattttttttgaggacccgatctttaccttcagg

SEQ ID NO: 575 - DNA, 104 bp, synthetic construct
  source 1..104: mol_type = other DNA
gtcgtgaagcatgtggttttagagctacctgaaggtaaagatcgggtcctcttttttttcagccaactccaattttttttgaggacccgatctttaccttcagg

SEQ ID NO: 576 - DNA, 104 bp, synthetic construct
  source 1..104: mol_type = other DNA
gcagcaccagggaaagttttagagctacctgaaggtaaagatcgggtcctcttttttttcagccaactccaattttttttgaggacccgatctttaccttcagg

SEQ ID NO: 577 - DNA, 102 bp, synthetic construct
  source 1..102: mol_type = other DNA
gatgggccaggcggcgttttagagctacctggttatagcggacgcactgtttttttttcagccaactccaattttttttacagtgcgtccgctataaccagg

SEQ ID NO: 578 - DNA, 102 bp, synthetic construct
  source 1..102: mol_type = other DNA
gacccgctggtcctggttttagagctacctggttatagcggacgcactgtttttttttcagccaactccaattttttttacagtgcgtccgctataaccagg

SEQ ID NO: 579 - DNA, 102 bp, synthetic construct
  source 1..102: mol_type = other DNA
gtcgtgaagcatgtggttttagagctacctggttatagcggacgcactgtttttttttcagccaactccaattttttttacagtgcgtccgctataaccagg

SEQ ID NO: 580 - DNA, 102 bp, synthetic construct
  source 1..102: mol_type = other DNA
gcagcaccagggaaagttttagagctacctggttatagcggacgcactgtttttttttcagccaactccaattttttttacagtgcgtccgctataaccagg

SEQ ID NO: 581 - DNA, 102 bp, synthetic construct
  source 1..102: mol_type = other DNA
gatgggccaggcggcgttttagagctaccgcatcgtattatctgcgaagcttttttttcagccaactccaattttttttgcttcgcagataatacgatgcgg

SEQ ID NO: 582 - DNA, 102 bp, synthetic construct
  source 1..102: mol_type = other DNA
gacccgctggtcctggttttagagctaccgcatcgtattatctgcgaagcttttttttcagccaactccaattttttttgcttcgcagataatacgatgcgg

SEQ ID NO: 583 - DNA, 102 bp, synthetic construct
  source 1..102: mol_type = other DNA
gtcgtgaagcatgtggttttagagctaccgcatcgtattatctgcgaagcttttttttcagccaactccaattttttttgcttcgcagataatacgatgcgg

SEQ ID NO: 584 - DNA, 102 bp, synthetic construct
  source 1..102: mol_type = other DNA
gcagcaccagggaaagttttagagctaccgcatcgtattatctgcgaagcttttttttcagccaactccaattttttttgcttcgcagataatacgatgcgg

SEQ ID NO: 585 - DNA, 102 bp, synthetic construct
  source 1..102: mol_type = other DNA
gatgggccaggcggcgttttagagctaccgctaggacgttcaacggagtcttttttttcagccaactccaattttttttgactccgttgaacgtcctagcgg

SEQ ID NO: 586 - DNA, 102 bp, synthetic construct
  source 1..102: mol_type = other DNA
gacccgctggtcctggttttagagctaccgctaggacgttcaacggagtcttttttttcagccaactccaattttttttgactccgttgaacgtcctagcgg

SEQ ID NO: 587 - DNA, 102 bp, synthetic construct
  source 1..102: mol_type = other DNA
gtcgtgaagcatgtggttttagagctaccgctaggacgttcaacggagtcttttttttcagccaactccaattttttttgactccgttgaacgtcctagcgg

SEQ ID NO: 588 - DNA, 102 bp, synthetic construct
  source 1..102: mol_type = other DNA
gcagcaccagggaaagttttagagctaccgctaggacgttcaacggagtcttttttttcagccaactccaattttttttgactccgttgaacgtcctagcgg

SEQ ID NO: 589 - DNA, 102 bp, synthetic construct
  source 1..102: mol_type = other DNA
gatgggccaggcggcgttttagagctaccatagcggtactatcggcatctttttttttcagccaactccaattttttttagatgccgatagtaccgctatgg

SEQ ID NO: 590 - DNA, 102 bp, synthetic construct
  source 1..102: mol_type = other DNA
gacccgctggtcctggttttagagctaccatagcggtactatcggcatctttttttttcagccaactccaattttttttagatgccgatagtaccgctatgg

SEQ ID NO: 591 - DNA, 102 bp, synthetic construct
  source 1..102: mol_type = other DNA
gtcgtgaagcatgtggttttagagctaccatagcggtactatcggcatctttttttttcagccaactccaattttttttagatgccgatagtaccgctatgg

SEQ ID NO: 592 - DNA, 102 bp, synthetic construct
  source 1..102: mol_type = other DNA
gcagcaccagggaaagttttagagctaccatagcggtactatcggcatctttttttttcagccaactccaattttttttagatgccgatagtaccgctatgg

SEQ ID NO: 593 - DNA, 102 bp, synthetic construct
  source 1..102: mol_type = other DNA
gatgggccaggcggcgttttagagctacctcgtactagtctcgcatgaccttttttttcagccaactccaattttttttggtcatgcgagactagtacgagg

SEQ ID NO: 594 - DNA, 102 bp, synthetic construct
  source 1..102: mol_type = other DNA
gacccgctggtcctggttttagagctacctcgtactagtctcgcatgaccttttttttcagccaactccaattttttttggtcatgcgagactagtacgagg

SEQ ID NO: 595 - DNA, 102 bp, synthetic construct
  source 1..102: mol_type = other DNA
gtcgtgaagcatgtggttttagagctacctcgtactagtctcgcatgaccttttttttcagccaactccaattttttttggtcatgcgagactagtacgagg

SEQ ID NO: 596 - DNA, 102 bp, synthetic construct
  source 1..102: mol_type = other DNA
gcagcaccagggaaagttttagagctacctcgtactagtctcgcatgaccttttttttcagccaactccaattttttttggtcatgcgagactagtacgagg

SEQ ID NO: 597 - DNA, 102 bp, synthetic construct
  source 1..102: mol_type = other DNA
gatgggccaggcggcgttttagagctaccgatagtgctaaacgacgctttttttttttcagccaactccaattttttttaaagcgtcgtttagcactatcgg

SEQ ID NO: 598 - DNA, 102 bp, synthetic construct
  source 1..102: mol_type = other DNA
gacccgctggtcctggttttagagctaccgatagtgctaaacgacgctttttttttttcagccaactccaattttttttaaagcgtcgtttagcactatcgg

SEQ ID NO: 599 - DNA, 102 bp, synthetic construct
  source 1..102: mol_type = other DNA
gtcgtgaagcatgtggttttagagctaccgatagtgctaaacgacgctttttttttttcagccaactccaattttttttaaagcgtcgtttagcactatcgg

SEQ ID NO: 600 - DNA, 102 bp, synthetic construct
  source 1..102: mol_type = other DNA
gcagcaccagggaaagttttagagctaccgatagtgctaaacgacgctttttttttttcagccaactccaattttttttaaagcgtcgtttagcactatcgg

SEQ ID NO: 601 - DNA, 102 bp, synthetic construct
  source 1..102: mol_type = other DNA
gatgggccaggcggcgttttagagctacccgttatcgacgttcaaggaacttttttttcagccaactccaattttttttgttccttgaacgtcgataacggg

SEQ ID NO: 602 - DNA, 102 bp, synthetic construct
  source 1..102: mol_type = other DNA
gacccgctggtcctggttttagagctacccgttatcgacgttcaaggaacttttttttcagccaactccaattttttttgttccttgaacgtcgataacggg

SEQ ID NO: 603 - DNA, 102 bp, synthetic construct
  source 1..102: mol_type = other DNA
gtcgtgaagcatgtggttttagagctacccgttatcgacgttcaaggaacttttttttcagccaactccaattttttttgttccttgaacgtcgataacggg

SEQ ID NO: 604 - DNA, 102 bp, synthetic construct
  source 1..102: mol_type = other DNA
gcagcaccagggaaagttttagagctacccgttatcgacgttcaaggaacttttttttcagccaactccaattttttttgttccttgaacgtcgataacggg

SEQ ID NO: 605 - DNA, 102 bp, synthetic construct
  source 1..102: mol_type = other DNA
gatgggccaggcggcgttttagagctaccgatcaatgcggtctgcgtaacttttttttcagccaactccaattttttttgttacgcagaccgcattgatcgg

SEQ ID NO: 606 - DNA, 102 bp, synthetic construct
  source 1..102: mol_type = other DNA
gacccgctggtcctggttttagagctaccgatcaatgcggtctgcgtaacttttttttcagccaactccaattttttttgttacgcagaccgcattgatcgg

SEQ ID NO: 607 - DNA, 102 bp, synthetic construct
  source 1..102: mol_type = other DNA
gtcgtgaagcatgtggttttagagctaccgatcaatgcggtctgcgtaacttttttttcagccaactccaattttttttgttacgcagaccgcattgatcgg

SEQ ID NO: 608 - DNA, 102 bp, synthetic construct
  source 1..102: mol_type = other DNA
gcagcaccagggaaagttttagagctaccgatcaatgcggtctgcgtaacttttttttcagccaactccaattttttttgttacgcagaccgcattgatcgg

SEQ ID NO: 609 - DNA, 102 bp, synthetic construct
  source 1..102: mol_type = other DNA
gatgggccaggcggcgttttagagctacccttactcgcgatactctcgacttttttttcagccaactccaattttttttgtcgagagtatcgcgagtaaggg

SEQ ID NO: 610 - DNA, 102 bp, synthetic construct
  source 1..102: mol_type = other DNA
gacccgctggtcctggttttagagctacccttactcgcgatactctcgacttttttttcagccaactccaattttttttgtcgagagtatcgcgagtaaggg

SEQ ID NO: 611 - DNA, 102 bp, synthetic construct
  source 1..102: mol_type = other DNA
gtcgtgaagcatgtggttttagagctacccttactcgcgatactctcgacttttttttcagccaactccaattttttttgtcgagagtatcgcgagtaaggg

SEQ ID NO: 612 - DNA, 102 bp, synthetic construct
  source 1..102: mol_type = other DNA
gcagcaccagggaaagttttagagctacccttactcgcgatactctcgacttttttttcagccaactccaattttttttgtcgagagtatcgcgagtaaggg

SEQ ID NO: 613 - DNA, 102 bp, synthetic construct
  source 1..102: mol_type = other DNA
gatgggccaggcggcgttttagagctaccgcggacggtaagcacggaatattttttttcagccaactccaatttttttttattccgtgcttaccgtccgcgg

SEQ ID NO: 614 - DNA, 102 bp, synthetic construct
  source 1..102: mol_type = other DNA
gacccgctggtcctggttttagagctaccgcggacggtaagcacggaatattttttttcagccaactccaatttttttttattccgtgcttaccgtccgcgg

SEQ ID NO: 615 - DNA, 102 bp, synthetic construct
  source 1..102: mol_type = other DNA
gtcgtgaagcatgtggttttagagctaccgcggacggtaagcacggaatattttttttcagccaactccaatttttttttattccgtgcttaccgtccgcgg

SEQ ID NO: 616 - DNA, 102 bp, synthetic construct
  source 1..102: mol_type = other DNA
gcagcaccagggaaagttttagagctaccgcggacggtaagcacggaatattttttttcagccaactccaatttttttttattccgtgcttaccgtccgcgg

SEQ ID NO: 617 - DNA, 102 bp, synthetic construct
  source 1..102: mol_type = other DNA
gatgggccaggcggcgttttagagctacctatagtcacgaatcgtagggtttttttttcagccaactccaattttttttaccctacgattcgtgactatagg

SEQ ID NO: 618 - DNA, 102 bp, synthetic construct
  source 1..102: mol_type = other DNA
gacccgctggtcctggttttagagctacctatagtcacgaatcgtagggtttttttttcagccaactccaattttttttaccctacgattcgtgactatagg

SEQ ID NO: 619 - DNA, 102 bp, synthetic construct
  source 1..102: mol_type = other DNA
gtcgtgaagcatgtggttttagagctacctatagtcacgaatcgtagggtttttttttcagccaactccaattttttttaccctacgattcgtgactatagg

SEQ ID NO: 620 - DNA, 102 bp, synthetic construct
  source 1..102: mol_type = other DNA
gcagcaccagggaaagttttagagctacctatagtcacgaatcgtagggtttttttttcagccaactccaattttttttaccctacgattcgtgactatagg

SEQ ID NO: 621 - DNA, 102 bp, synthetic construct
  source 1..102: mol_type = other DNA
gatgggccaggcggcgttttagagctacccgtcgtcacgtatgcgtagcattttttttcagccaactccaatttttttttgctacgcatacgtgacgacggg

SEQ ID NO: 622 - DNA, 102 bp, synthetic construct
  source 1..102: mol_type = other DNA
gacccgctggtcctggttttagagctacccgtcgtcacgtatgcgtagcattttttttcagccaactccaatttttttttgctacgcatacgtgacgacggg

SEQ ID NO: 623 - DNA, 102 bp, synthetic construct
  source 1..102: mol_type = other DNA
gtcgtgaagcatgtggttttagagctacccgtcgtcacgtatgcgtagcattttttttcagccaactccaatttttttttgctacgcatacgtgacgacggg

SEQ ID NO: 624 - DNA, 102 bp, synthetic construct
  source 1..102: mol_type = other DNA
gcagcaccagggaaagttttagagctacccgtcgtcacgtatgcgtagcattttttttcagccaactccaatttttttttgctacgcatacgtgacgacggg

SEQ ID NO: 625 - DNA, 102 bp, synthetic construct
  source 1..102: mol_type = other DNA
gatgggccaggcggcgttttagagctacccgagaggtagtagacgacgcattttttttcagccaactccaatttttttttgcgtcgtctactacctctcggg

SEQ ID NO: 626 - DNA, 102 bp, synthetic construct
  source 1..102: mol_type = other DNA
gacccgctggtcctggttttagagctacccgagaggtagtagacgacgcattttttttcagccaactccaatttttttttgcgtcgtctactacctctcggg

SEQ ID NO: 627 - DNA, 102 bp, synthetic construct
  source 1..102: mol_type = other DNA
gtcgtgaagcatgtggttttagagctacccgagaggtagtagacgacgcattttttttcagccaactccaatttttttttgcgtcgtctactacctctcggg

SEQ ID NO: 628 - DNA, 102 bp, synthetic construct
  source 1..102: mol_type = other DNA
gcagcaccagggaaagttttagagctacccgagaggtagtagacgacgcattttttttcagccaactccaatttttttttgcgtcgtctactacctctcggg

SEQ ID NO: 629 - DNA, 102 bp, synthetic construct
  source 1..102: mol_type = other DNA
gatgggccaggcggcgttttagagctaccgacgtctacggacgggagctattttttttcagccaactccaatttttttttagctcccgtccgtagacgtcgg

SEQ ID NO: 630 - DNA, 102 bp, synthetic construct
  source 1..102: mol_type = other DNA
gacccgctggtcctggttttagagctaccgacgtctacggacgggagctattttttttcagccaactccaatttttttttagctcccgtccgtagacgtcgg

SEQ ID NO: 631 - DNA, 102 bp, synthetic construct
  source 1..102: mol_type = other DNA
gtcgtgaagcatgtggttttagagctaccgacgtctacggacgggagctattttttttcagccaactccaatttttttttagctcccgtccgtagacgtcgg

SEQ ID NO: 632 - DNA, 102 bp, synthetic construct
  source 1..102: mol_type = other DNA
gcagcaccagggaaagttttagagctaccgacgtctacggacgggagctattttttttcagccaactccaatttttttttagctcccgtccgtagacgtcgg

SEQ ID NO: 633 - DNA, 102 bp, synthetic construct
  source 1..102: mol_type = other DNA
gatgggccaggcggcgttttagagctaccaaagctcattcgcgactgagcttttttttcagccaactccaattttttttgctcagtcgcgaatgagctttgg

SEQ ID NO: 634 - DNA, 102 bp, synthetic construct
  source 1..102: mol_type = other DNA
gacccgctggtcctggttttagagctaccaaagctcattcgcgactgagcttttttttcagccaactccaattttttttgctcagtcgcgaatgagctttgg

SEQ ID NO: 635 - DNA, 102 bp, synthetic construct
  source 1..102: mol_type = other DNA
gtcgtgaagcatgtggttttagagctaccaaagctcattcgcgactgagcttttttttcagccaactccaattttttttgctcagtcgcgaatgagctttgg

SEQ ID NO: 636 - DNA, 102 bp, synthetic construct
  source 1..102: mol_type = other DNA
gcagcaccagggaaagttttagagctaccaaagctcattcgcgactgagcttttttttcagccaactccaattttttttgctcagtcgcgaatgagctttgg

SEQ ID NO: 637 - DNA, 102 bp, synthetic construct
  source 1..102: mol_type = other DNA
gatgggccaggcggcgttttagagctaccatggcacgatcgacacggaggttttttttcagccaactccaattttttttcctccgtgtcgatcgtgccatgg

SEQ ID NO: 638 - DNA, 102 bp, synthetic construct
  source 1..102: mol_type = other DNA
gacccgctggtcctggttttagagctaccatggcacgatcgacacggaggttttttttcagccaactccaattttttttcctccgtgtcgatcgtgccatgg

SEQ ID NO: 639 - DNA, 102 bp, synthetic construct
  source 1..102: mol_type = other DNA
gtcgtgaagcatgtggttttagagctaccatggcacgatcgacacggaggttttttttcagccaactccaattttttttcctccgtgtcgatcgtgccatgg

SEQ ID NO: 640 - DNA, 102 bp, synthetic construct
  source 1..102: mol_type = other DNA
gcagcaccagggaaagttttagagctaccatggcacgatcgacacggaggttttttttcagccaactccaattttttttcctccgtgtcgatcgtgccatgg

SEQ ID NO: 641 - DNA, 102 bp, synthetic construct
  source 1..102: mol_type = other DNA
gatgggccaggcggcgttttagagctacccgaactctctatcgaacgagtttttttttcagccaactccaattttttttactcgttcgatagagagttcggg

SEQ ID NO: 642 - DNA, 102 bp, synthetic construct
  source 1..102: mol_type = other DNA
gacccgctggtcctggttttagagctacccgaactctctatcgaacgagtttttttttcagccaactccaattttttttactcgttcgatagagagttcggg

SEQ ID NO: 643 - DNA, 102 bp, synthetic construct
  source 1..102: mol_type = other DNA
gtcgtgaagcatgtggttttagagctacccgaactctctatcgaacgagtttttttttcagccaactccaattttttttactcgttcgatagagagttcggg

SEQ ID NO: 644 - DNA, 102 bp, synthetic construct
  source 1..102: mol_type = other DNA
gcagcaccagggaaagttttagagctacccgaactctctatcgaacgagtttttttttcagccaactccaattttttttactcgttcgatagagagttcggg

SEQ ID NO: 645 - DNA, 104 bp, synthetic construct
  source 1..104: mol_type = other DNA
gcgccgagcggtcaggttttagagctaccgtcgttgtaccgtctacttgacttttttttcagccaactccaattttttttgtcaagtagacggtacaacgacgg

SEQ ID NO: 646 - DNA, 103 bp, synthetic construct
  source 1..103: mol_type = other DNA
gtgcaccacggcgtgttttagagctaccgtcgttgtaccgtctacttgacttttttttcagccaactccaattttttttgtcaagtagacggtacaacgacgg

SEQ ID NO: 647 - DNA, 104 bp, synthetic construct
  source 1..104: mol_type = other DNA
gcgatggagctgagtgttttagagctaccgtcgttgtaccgtctacttgacttttttttcagccaactccaattttttttgtcaagtagacggtacaacgacgg

SEQ ID NO: 648 - DNA, 104 bp, synthetic construct
  source 1..104: mol_type = other DNA
gagcgccgcgcccatgttttagagctaccgtcgttgtaccgtctacttgacttttttttcagccaactccaattttttttgtcaagtagacggtacaacgacgg

SEQ ID NO: 649 - DNA, 102 bp, synthetic construct
  source 1..102: mol_type = other DNA
gcgccgagcggtcaggttttagagctacctacactcgacatcggtagctattttttttcagccaactccaatttttttttagctaccgatgtcgagtgtagg

SEQ ID NO: 650 - DNA, 101 bp, synthetic construct
  source 1..101: mol_type = other DNA
gtgcaccacggcgtgttttagagctacctacactcgacatcggtagctattttttttcagccaactccaatttttttttagctaccgatgtcgagtgtagg

SEQ ID NO: 651 - DNA, 102 bp, synthetic construct
  source 1..102: mol_type = other DNA
gcgatggagctgagtgttttagagctacctacactcgacatcggtagctattttttttcagccaactccaatttttttttagctaccgatgtcgagtgtagg

SEQ ID NO: 652 - DNA, 102 bp, synthetic construct
  source 1..102: mol_type = other DNA
gagcgccgcgcccatgttttagagctacctacactcgacatcggtagctattttttttcagccaactccaatttttttttagctaccgatgtcgagtgtagg

SEQ ID NO: 653 - DNA, 102 bp, synthetic construct
  source 1..102: mol_type = other DNA
gcgccgagcggtcaggttttagagctaccctggcggaacgttcgagtaatttttttttcagccaactccaattttttttattactcgaacgttccgccaggg

SEQ ID NO: 654 - DNA, 101 bp, synthetic construct
  source 1..101: mol_type = other DNA
gtgcaccacggcgtgttttagagctaccctggcggaacgttcgagtaatttttttttcagccaactccaattttttttattactcgaacgttccgccaggg

SEQ ID NO: 655 - DNA, 102 bp, synthetic construct
  source 1..102: mol_type = other DNA
gcgatggagctgagtgttttagagctaccctggcggaacgttcgagtaatttttttttcagccaactccaattttttttattactcgaacgttccgccaggg

SEQ ID NO: 656 - DNA, 102 bp, synthetic construct
  source 1..102: mol_type = other DNA
gagcgccgcgcccatgttttagagctaccctggcggaacgttcgagtaatttttttttcagccaactccaattttttttattactcgaacgttccgccaggg

SEQ ID NO: 657 - DNA, 102 bp, synthetic construct
  source 1..102: mol_type = other DNA
gcgccgagcggtcaggttttagagctacctacacgatagtggtcgtgcgcttttttttcagccaactccaattttttttgcgcacgaccactatcgtgtagg

SEQ ID NO: 658 - DNA, 101 bp, synthetic construct
  source 1..101: mol_type = other DNA
gtgcaccacggcgtgttttagagctacctacacgatagtggtcgtgcgcttttttttcagccaactccaattttttttgcgcacgaccactatcgtgtagg

SEQ ID NO: 659 - DNA, 102 bp, synthetic construct
  source 1..102: mol_type = other DNA
gcgatggagctgagtgttttagagctacctacacgatagtggtcgtgcgcttttttttcagccaactccaattttttttgcgcacgaccactatcgtgtagg

SEQ ID NO: 660 - DNA, 102 bp, synthetic construct
  source 1..102: mol_type = other DNA
gagcgccgcgcccatgttttagagctacctacacgatagtggtcgtgcgcttttttttcagccaactccaattttttttgcgcacgaccactatcgtgtagg

SEQ ID NO: 661 - DNA, 104 bp, synthetic construct
  source 1..104: mol_type = other DNA
gcgccgagcggtcaggttttagagctaccttcccgacttccgtaggagcgcttttttttcagccaactccaattttttttgcgctcctacggaagtcgggaagg

SEQ ID NO: 662 - DNA, 103 bp, synthetic construct
  source 1..103: mol_type = other DNA
gtgcaccacggcgtgttttagagctaccttcccgacttccgtaggagcgcttttttttcagccaactccaattttttttgcgctcctacggaagtcgggaagg

SEQ ID NO: 663 - DNA, 104 bp, synthetic construct
  source 1..104: mol_type = other DNA
gcgatggagctgagtgttttagagctaccttcccgacttccgtaggagcgcttttttttcagccaactccaattttttttgcgctcctacggaagtcgggaagg

SEQ ID NO: 664 - DNA, 104 bp, synthetic construct
  source 1..104: mol_type = other DNA
gagcgccgcgcccatgttttagagctaccttcccgacttccgtaggagcgcttttttttcagccaactccaattttttttgcgctcctacggaagtcgggaagg

SEQ ID NO: 665 - DNA, 104 bp, synthetic construct
  source 1..104: mol_type = other DNA
gcgccgagcggtcaggttttagagctacctgaaggtaaagatcgggtcctcttttttttcagccaactccaattttttttgaggacccgatctttaccttcagg

SEQ ID NO: 666 - DNA, 103 bp, synthetic construct
  source 1..103: mol_type = other DNA
gtgcaccacggcgtgttttagagctacctgaaggtaaagatcgggtcctcttttttttcagccaactccaattttttttgaggacccgatctttaccttcagg

SEQ ID NO: 667 - DNA, 104 bp, synthetic construct
  source 1..104: mol_type = other DNA
gcgatggagctgagtgttttagagctacctgaaggtaaagatcgggtcctcttttttttcagccaactccaattttttttgaggacccgatctttaccttcagg

SEQ ID NO: 668 - DNA, 104 bp, synthetic construct
  source 1..104: mol_type = other DNA
gagcgccgcgcccatgttttagagctacctgaaggtaaagatcgggtcctcttttttttcagccaactccaattttttttgaggacccgatctttaccttcagg

SEQ ID NO: 669 - DNA, 102 bp, synthetic construct
  source 1..102: mol_type = other DNA
gcgccgagcggtcaggttttagagctacctggttatagcggacgcactgtttttttttcagccaactccaattttttttacagtgcgtccgctataaccagg

SEQ ID NO: 670 - DNA, 101 bp, synthetic construct
  source 1..101: mol_type = other DNA
gtgcaccacggcgtgttttagagctacctggttatagcggacgcactgtttttttttcagccaactccaattttttttacagtgcgtccgctataaccagg

SEQ ID NO: 671 - DNA, 102 bp, synthetic construct
  source 1..102: mol_type = other DNA
gcgatggagctgagtgttttagagctacctggttatagcggacgcactgtttttttttcagccaactccaattttttttacagtgcgtccgctataaccagg

SEQ ID NO: 672 - DNA, 102 bp, synthetic construct
  source 1..102: mol_type = other DNA
gagcgccgcgcccatgttttagagctacctggttatagcggacgcactgtttttttttcagccaactccaattttttttacagtgcgtccgctataaccagg

SEQ ID NO: 673 - DNA, 102 bp, synthetic construct
  source 1..102: mol_type = other DNA
gcgccgagcggtcaggttttagagctaccgcatcgtattatctgcgaagcttttttttcagccaactccaattttttttgcttcgcagataatacgatgcgg

SEQ ID NO: 674 - DNA, 101 bp, synthetic construct
  source 1..101: mol_type = other DNA
gtgcaccacggcgtgttttagagctaccgcatcgtattatctgcgaagcttttttttcagccaactccaattttttttgcttcgcagataatacgatgcgg

SEQ ID NO: 675 - DNA, 102 bp, synthetic construct
  source 1..102: mol_type = other DNA
gcgatggagctgagtgttttagagctaccgcatcgtattatctgcgaagcttttttttcagccaactccaattttttttgcttcgcagataatacgatgcgg

SEQ ID NO: 676 - DNA, 102 bp, synthetic construct
  source 1..102: mol_type = other DNA
gagcgccgcgcccatgttttagagctaccgcatcgtattatctgcgaagcttttttttcagccaactccaattttttttgcttcgcagataatacgatgcgg

SEQ ID NO: 677 - DNA, 102 bp, synthetic construct
  source 1..102: mol_type = other DNA
gcgccgagcggtcaggttttagagctaccgctaggacgttcaacggagtcttttttttcagccaactccaattttttttgactccgttgaacgtcctagcgg

SEQ ID NO: 678 - DNA, 101 bp, synthetic construct
  source 1..101: mol_type = other DNA
gtgcaccacggcgtgttttagagctaccgctaggacgttcaacggagtcttttttttcagccaactccaattttttttgactccgttgaacgtcctagcgg

SEQ ID NO: 679 - DNA, 102 bp, synthetic construct
  source 1..102: mol_type = other DNA
gcgatggagctgagtgttttagagctaccgctaggacgttcaacggagtcttttttttcagccaactccaattttttttgactccgttgaacgtcctagcgg

SEQ ID NO: 680 - DNA, 102 bp, synthetic construct
  source 1..102: mol_type = other DNA
gagcgccgcgcccatgttttagagctaccgctaggacgttcaacggagtcttttttttcagccaactccaattttttttgactccgttgaacgtcctagcgg

SEQ ID NO: 681 - DNA, 102 bp, synthetic construct
  source 1..102: mol_type = other DNA
gcgccgagcggtcaggttttagagctaccatagcggtactatcggcatctttttttttcagccaactccaattttttttagatgccgatagtaccgctatgg

SEQ ID NO: 682 - DNA, 101 bp, synthetic construct
  source 1..101: mol_type = other DNA
gtgcaccacggcgtgttttagagctaccatagcggtactatcggcatctttttttttcagccaactccaattttttttagatgccgatagtaccgctatgg

SEQ ID NO: 683 - DNA, 102 bp, synthetic construct
  source 1..102: mol_type = other DNA
gcgatggagctgagtgttttagagctaccatagcggtactatcggcatctttttttttcagccaactccaattttttttagatgccgatagtaccgctatgg

SEQ ID NO: 684 - DNA, 102 bp, synthetic construct
  source 1..102: mol_type = other DNA
gagcgccgcgcccatgttttagagctaccatagcggtactatcggcatctttttttttcagccaactccaattttttttagatgccgatagtaccgctatgg

SEQ ID NO: 685 - DNA, 102 bp, synthetic construct
  source 1..102: mol_type = other DNA
gcgccgagcggtcaggttttagagctacctcgtactagtctcgcatgaccttttttttcagccaactccaattttttttggtcatgcgagactagtacgagg

SEQ ID NO: 686 - DNA, 101 bp, synthetic construct
  source 1..101: mol_type = other DNA
gtgcaccacggcgtgttttagagctacctcgtactagtctcgcatgaccttttttttcagccaactccaattttttttggtcatgcgagactagtacgagg

SEQ ID NO: 687 - DNA, 102 bp, synthetic construct
  source 1..102: mol_type = other DNA
gcgatggagctgagtgttttagagctacctcgtactagtctcgcatgaccttttttttcagccaactccaattttttttggtcatgcgagactagtacgagg

SEQ ID NO: 688 - DNA, 102 bp, synthetic construct
  source 1..102: mol_type = other DNA
gagcgccgcgcccatgttttagagctacctcgtactagtctcgcatgaccttttttttcagccaactccaattttttttggtcatgcgagactagtacgagg

SEQ ID NO: 689 - DNA, 102 bp, synthetic construct
  source 1..102: mol_type = other DNA
gcgccgagcggtcaggttttagagctaccgatagtgctaaacgacgctttttttttttcagccaactccaattttttttaaagcgtcgtttagcactatcgg

SEQ ID NO: 690 - DNA, 101 bp, synthetic construct
  source 1..101: mol_type = other DNA
gtgcaccacggcgtgttttagagctaccgatagtgctaaacgacgctttttttttttcagccaactccaattttttttaaagcgtcgtttagcactatcgg

SEQ ID NO: 691 - DNA, 102 bp, synthetic construct
  source 1..102: mol_type = other DNA
gcgatggagctgagtgttttagagctaccgatagtgctaaacgacgctttttttttttcagccaactccaattttttttaaagcgtcgtttagcactatcgg

SEQ ID NO: 692 - DNA, 102 bp, synthetic construct
  source 1..102: mol_type = other DNA
gagcgccgcgcccatgttttagagctaccgatagtgctaaacgacgctttttttttttcagccaactccaattttttttaaagcgtcgtttagcactatcgg

SEQ ID NO: 693 - DNA, 102 bp, synthetic construct
  source 1..102: mol_type = other DNA
gcgccgagcggtcaggttttagagctacccgttatcgacgttcaaggaacttttttttcagccaactccaattttttttgttccttgaacgtcgataacggg

SEQ ID NO: 694 - DNA, 101 bp, synthetic construct
  source 1..101: mol_type = other DNA
gtgcaccacggcgtgttttagagctacccgttatcgacgttcaaggaacttttttttcagccaactccaattttttttgttccttgaacgtcgataacggg

SEQ ID NO: 695 - DNA, 102 bp, synthetic construct
  source 1..102: mol_type = other DNA
gcgatggagctgagtgttttagagctacccgttatcgacgttcaaggaacttttttttcagccaactccaattttttttgttccttgaacgtcgataacggg

SEQ ID NO: 696 - DNA, 102 bp, synthetic construct
  source 1..102: mol_type = other DNA
gagcgccgcgcccatgttttagagctacccgttatcgacgttcaaggaacttttttttcagccaactccaattttttttgttccttgaacgtcgataacggg

SEQ ID NO: 697 - DNA, 102 bp, synthetic construct
  source 1..102: mol_type = other DNA
gcgccgagcggtcaggttttagagctaccgatcaatgcggtctgcgtaacttttttttcagccaactccaattttttttgttacgcagaccgcattgatcgg

SEQ ID NO: 698 - DNA, 101 bp, synthetic construct
  source 1..101: mol_type = other DNA
gtgcaccacggcgtgttttagagctaccgatcaatgcggtctgcgtaacttttttttcagccaactccaattttttttgttacgcagaccgcattgatcgg

SEQ ID NO: 699 - DNA, 102 bp, synthetic construct
  source 1..102: mol_type = other DNA
gcgatggagctgagtgttttagagctaccgatcaatgcggtctgcgtaacttttttttcagccaactccaattttttttgttacgcagaccgcattgatcgg

SEQ ID NO: 700 - DNA, 102 bp, synthetic construct
  source 1..102: mol_type = other DNA
gagcgccgcgcccatgttttagagctaccgatcaatgcggtctgcgtaacttttttttcagccaactccaattttttttgttacgcagaccgcattgatcgg

SEQ ID NO: 701 - DNA, 102 bp, synthetic construct
  source 1..102: mol_type = other DNA
gcgccgagcggtcaggttttagagctacccttactcgcgatactctcgacttttttttcagccaactccaattttttttgtcgagagtatcgcgagtaaggg

SEQ ID NO: 702 - DNA, 101 bp, synthetic construct
  source 1..101: mol_type = other DNA
gtgcaccacggcgtgttttagagctacccttactcgcgatactctcgacttttttttcagccaactccaattttttttgtcgagagtatcgcgagtaaggg

SEQ ID NO: 703 - DNA, 102 bp, synthetic construct
  source 1..102: mol_type = other DNA
gcgatggagctgagtgttttagagctacccttactcgcgatactctcgacttttttttcagccaactccaattttttttgtcgagagtatcgcgagtaaggg

SEQ ID NO: 704 - DNA, 102 bp, synthetic construct
  source 1..102: mol_type = other DNA
gagcgccgcgcccatgttttagagctacccttactcgcgatactctcgacttttttttcagccaactccaattttttttgtcgagagtatcgcgagtaaggg

SEQ ID NO: 705 - DNA, 102 bp, synthetic construct
  source 1..102: mol_type = other DNA
gcgccgagcggtcaggttttagagctaccgcggacggtaagcacggaatattttttttcagccaactccaatttttttttattccgtgcttaccgtccgcgg

SEQ ID NO: 706 - DNA, 101 bp, synthetic construct
  source 1..101: mol_type = other DNA
gtgcaccacggcgtgttttagagctaccgcggacggtaagcacggaatattttttttcagccaactccaatttttttttattccgtgcttaccgtccgcgg

SEQ ID NO: 707 - DNA, 102 bp, synthetic construct
  source 1..102: mol_type = other DNA
gcgatggagctgagtgttttagagctaccgcggacggtaagcacggaatattttttttcagccaactccaatttttttttattccgtgcttaccgtccgcgg

SEQ ID NO: 708 - DNA, 102 bp, synthetic construct
  source 1..102: mol_type = other DNA
gagcgccgcgcccatgttttagagctaccgcggacggtaagcacggaatattttttttcagccaactccaatttttttttattccgtgcttaccgtccgcgg

SEQ ID NO: 709 - DNA, 102 bp, synthetic construct
  source 1..102: mol_type = other DNA
gcgccgagcggtcaggttttagagctacctatagtcacgaatcgtagggtttttttttcagccaactccaattttttttaccctacgattcgtgactatagg

SEQ ID NO: 710 - DNA, 101 bp, synthetic construct
  source 1..101: mol_type = other DNA
gtgcaccacggcgtgttttagagctacctatagtcacgaatcgtagggtttttttttcagccaactccaattttttttaccctacgattcgtgactatagg

SEQ ID NO: 711 - DNA, 102 bp, synthetic construct
  source 1..102: mol_type = other DNA
gcgatggagctgagtgttttagagctacctatagtcacgaatcgtagggtttttttttcagccaactccaattttttttaccctacgattcgtgactatagg

SEQ ID NO: 712 - DNA, 102 bp, synthetic construct
  source 1..102: mol_type = other DNA
gagcgccgcgcccatgttttagagctacctatagtcacgaatcgtagggtttttttttcagccaactccaattttttttaccctacgattcgtgactatagg

SEQ ID NO: 713 - DNA, 102 bp, synthetic construct
  source 1..102: mol_type = other DNA
gcgccgagcggtcaggttttagagctacccgtcgtcacgtatgcgtagcattttttttcagccaactccaatttttttttgctacgcatacgtgacgacggg

SEQ ID NO: 714 - DNA, 101 bp, synthetic construct
  source 1..101: mol_type = other DNA
gtgcaccacggcgtgttttagagctacccgtcgtcacgtatgcgtagcattttttttcagccaactccaatttttttttgctacgcatacgtgacgacggg

SEQ ID NO: 715 - DNA, 102 bp, synthetic construct
  source 1..102: mol_type = other DNA
gcgatggagctgagtgttttagagctacccgtcgtcacgtatgcgtagcattttttttcagccaactccaatttttttttgctacgcatacgtgacgacggg

SEQ ID NO: 716 - DNA, 102 bp, synthetic construct
  source 1..102: mol_type = other DNA
gagcgccgcgcccatgttttagagctacccgtcgtcacgtatgcgtagcattttttttcagccaactccaatttttttttgctacgcatacgtgacgacggg

SEQ ID NO: 717 - DNA, 102 bp, synthetic construct
  source 1..102: mol_type = other DNA
gcgccgagcggtcaggttttagagctacccgagaggtagtagacgacgcattttttttcagccaactccaatttttttttgcgtcgtctactacctctcggg

SEQ ID NO: 718 - DNA, 101 bp, synthetic construct
  source 1..101: mol_type = other DNA
gtgcaccacggcgtgttttagagctacccgagaggtagtagacgacgcattttttttcagccaactccaatttttttttgcgtcgtctactacctctcggg

SEQ ID NO: 719 - DNA, 102 bp, synthetic construct
  source 1..102: mol_type = other DNA
gcgatggagctgagtgttttagagctacccgagaggtagtagacgacgcattttttttcagccaactccaatttttttttgcgtcgtctactacctctcggg

SEQ ID NO: 720 - DNA, 102 bp, synthetic construct
  source 1..102: mol_type = other DNA
gagcgccgcgcccatgttttagagctacccgagaggtagtagacgacgcattttttttcagccaactccaatttttttttgcgtcgtctactacctctcggg

SEQ ID NO: 721 - DNA, 102 bp, synthetic construct
  source 1..102: mol_type = other DNA
gcgccgagcggtcaggttttagagctaccgacgtctacggacgggagctattttttttcagccaactccaatttttttttagctcccgtccgtagacgtcgg

SEQ ID NO: 722 - DNA, 101 bp, synthetic construct
  source 1..101: mol_type = other DNA
gtgcaccacggcgtgttttagagctaccgacgtctacggacgggagctattttttttcagccaactccaatttttttttagctcccgtccgtagacgtcgg

SEQ ID NO: 723 - DNA, 102 bp, synthetic construct
  source 1..102: mol_type = other DNA
gcgatggagctgagtgttttagagctaccgacgtctacggacgggagctattttttttcagccaactccaatttttttttagctcccgtccgtagacgtcgg

SEQ ID NO: 724 - DNA, 102 bp, synthetic construct
  source 1..102: mol_type = other DNA
gagcgccgcgcccatgttttagagctaccgacgtctacggacgggagctattttttttcagccaactccaatttttttttagctcccgtccgtagacgtcgg

SEQ ID NO: 725 - DNA, 102 bp, synthetic construct
  source 1..102: mol_type = other DNA
gcgccgagcggtcaggttttagagctaccaaagctcattcgcgactgagcttttttttcagccaactccaattttttttgctcagtcgcgaatgagctttgg

SEQ ID NO: 726 - DNA, 101 bp, synthetic construct
  source 1..101: mol_type = other DNA
gtgcaccacggcgtgttttagagctaccaaagctcattcgcgactgagcttttttttcagccaactccaattttttttgctcagtcgcgaatgagctttgg

SEQ ID NO: 727 - DNA, 102 bp, synthetic construct
  source 1..102: mol_type = other DNA
gcgatggagctgagtgttttagagctaccaaagctcattcgcgactgagcttttttttcagccaactccaattttttttgctcagtcgcgaatgagctttgg

SEQ ID NO: 728 - DNA, 102 bp, synthetic construct
  source 1..102: mol_type = other DNA
gagcgccgcgcccatgttttagagctaccaaagctcattcgcgactgagcttttttttcagccaactccaattttttttgctcagtcgcgaatgagctttgg

SEQ ID NO: 729 - DNA, 102 bp, synthetic construct
  source 1..102: mol_type = other DNA
gcgccgagcggtcaggttttagagctaccatggcacgatcgacacggaggttttttttcagccaactccaattttttttcctccgtgtcgatcgtgccatgg

SEQ ID NO: 730 - DNA, 101 bp, synthetic construct
  source 1..101: mol_type = other DNA
gtgcaccacggcgtgttttagagctaccatggcacgatcgacacggaggttttttttcagccaactccaattttttttcctccgtgtcgatcgtgccatgg

SEQ ID NO: 731 - DNA, 102 bp, synthetic construct
  source 1..102: mol_type = other DNA
gcgatggagctgagtgttttagagctaccatggcacgatcgacacggaggttttttttcagccaactccaattttttttcctccgtgtcgatcgtgccatgg

SEQ ID NO: 732 - DNA, 102 bp, synthetic construct
  source 1..102: mol_type = other DNA
gagcgccgcgcccatgttttagagctaccatggcacgatcgacacggaggttttttttcagccaactccaattttttttcctccgtgtcgatcgtgccatgg

SEQ ID NO: 733 - DNA, 102 bp, synthetic construct
  source 1..102: mol_type = other DNA
gcgccgagcggtcaggttttagagctacccgaactctctatcgaacgagtttttttttcagccaactccaattttttttactcgttcgatagagagttcggg

SEQ ID NO: 734 - DNA, 101 bp, synthetic construct
  source 1..101: mol_type = other DNA
gtgcaccacggcgtgttttagagctacccgaactctctatcgaacgagtttttttttcagccaactccaattttttttactcgttcgatagagagttcggg

SEQ ID NO: 735 - DNA, 102 bp, synthetic construct
  source 1..102: mol_type = other DNA
gcgatggagctgagtgttttagagctacccgaactctctatcgaacgagtttttttttcagccaactccaattttttttactcgttcgatagagagttcggg

SEQ ID NO: 736 - DNA, 102 bp, synthetic construct
  source 1..102: mol_type = other DNA
gagcgccgcgcccatgttttagagctacccgaactctctatcgaacgagtttttttttcagccaactccaattttttttactcgttcgatagagagttcggg

SEQ ID NO: 737 - DNA, 104 bp, synthetic construct
  source 1..104: mol_type = other DNA
gaaggggcactgtaagttttagagctaccgtcgttgtaccgtctacttgacttttttttcagccaactccaattttttttgtcaagtagacggtacaacgacgg

SEQ ID NO: 738 - DNA, 103 bp, synthetic construct
  source 1..103: mol_type = other DNA
gcaaaggcccagtcgttttagagctaccgtcgttgtaccgtctacttgacttttttttcagccaactccaattttttttgtcaagtagacggtacaacgacgg

SEQ ID NO: 739 - DNA, 104 bp, synthetic construct
  source 1..104: mol_type = other DNA
gcacggccccgccacgttttagagctaccgtcgttgtaccgtctacttgacttttttttcagccaactccaattttttttgtcaagtagacggtacaacgacgg

SEQ ID NO: 740 - DNA, 103 bp, synthetic construct
  source 1..103: mol_type = other DNA
gaacgcagctactggttttagagctaccgtcgttgtaccgtctacttgacttttttttcagccaactccaattttttttgtcaagtagacggtacaacgacgg

SEQ ID NO: 741 - DNA, 102 bp, synthetic construct
  source 1..102: mol_type = other DNA
gaaggggcactgtaagttttagagctacctacactcgacatcggtagctattttttttcagccaactccaatttttttttagctaccgatgtcgagtgtagg

SEQ ID NO: 742 - DNA, 101 bp, synthetic construct
  source 1..101: mol_type = other DNA
gcaaaggcccagtcgttttagagctacctacactcgacatcggtagctattttttttcagccaactccaatttttttttagctaccgatgtcgagtgtagg

SEQ ID NO: 743 - DNA, 102 bp, synthetic construct
  source 1..102: mol_type = other DNA
gcacggccccgccacgttttagagctacctacactcgacatcggtagctattttttttcagccaactccaatttttttttagctaccgatgtcgagtgtagg

SEQ ID NO: 744 - DNA, 101 bp, synthetic construct
  source 1..101: mol_type = other DNA
gaacgcagctactggttttagagctacctacactcgacatcggtagctattttttttcagccaactccaatttttttttagctaccgatgtcgagtgtagg

SEQ ID NO: 745 - DNA, 102 bp, synthetic construct
  source 1..102: mol_type = other DNA
gaaggggcactgtaagttttagagctaccctggcggaacgttcgagtaatttttttttcagccaactccaattttttttattactcgaacgttccgccaggg

SEQ ID NO: 746 - DNA, 101 bp, synthetic construct
  source 1..101: mol_type = other DNA
gcaaaggcccagtcgttttagagctaccctggcggaacgttcgagtaatttttttttcagccaactccaattttttttattactcgaacgttccgccaggg

SEQ ID NO: 747 - DNA, 102 bp, synthetic construct
  source 1..102: mol_type = other DNA
gcacggccccgccacgttttagagctaccctggcggaacgttcgagtaatttttttttcagccaactccaattttttttattactcgaacgttccgccaggg

SEQ ID NO: 748 - DNA, 101 bp, synthetic construct
  source 1..101: mol_type = other DNA
gaacgcagctactggttttagagctaccctggcggaacgttcgagtaatttttttttcagccaactccaattttttttattactcgaacgttccgccaggg

SEQ ID NO: 749 - DNA, 102 bp, synthetic construct
  source 1..102: mol_type = other DNA
gaaggggcactgtaagttttagagctacctacacgatagtggtcgtgcgcttttttttcagccaactccaattttttttgcgcacgaccactatcgtgtagg

SEQ ID NO: 750 - DNA, 101 bp, synthetic construct
  source 1..101: mol_type = other DNA
gcaaaggcccagtcgttttagagctacctacacgatagtggtcgtgcgcttttttttcagccaactccaattttttttgcgcacgaccactatcgtgtagg

SEQ ID NO: 751 - DNA, 102 bp, synthetic construct
  source 1..102: mol_type = other DNA
gcacggccccgccacgttttagagctacctacacgatagtggtcgtgcgcttttttttcagccaactccaattttttttgcgcacgaccactatcgtgtagg

SEQ ID NO: 752 - DNA, 101 bp, synthetic construct
  source 1..101: mol_type = other DNA
gaacgcagctactggttttagagctacctacacgatagtggtcgtgcgcttttttttcagccaactccaattttttttgcgcacgaccactatcgtgtagg

SEQ ID NO: 753 - DNA, 104 bp, synthetic construct
  source 1..104: mol_type = other DNA
gaaggggcactgtaagttttagagctaccttcccgacttccgtaggagcgcttttttttcagccaactccaattttttttgcgctcctacggaagtcgggaagg

SEQ ID NO: 754 - DNA, 103 bp, synthetic construct
  source 1..103: mol_type = other DNA
gcaaaggcccagtcgttttagagctaccttcccgacttccgtaggagcgcttttttttcagccaactccaattttttttgcgctcctacggaagtcgggaagg

SEQ ID NO: 755 - DNA, 104 bp, synthetic construct
  source 1..104: mol_type = other DNA
gcacggccccgccacgttttagagctaccttcccgacttccgtaggagcgcttttttttcagccaactccaattttttttgcgctcctacggaagtcgggaagg

SEQ ID NO: 756 - DNA, 103 bp, synthetic construct
  source 1..103: mol_type = other DNA
gaacgcagctactggttttagagctaccttcccgacttccgtaggagcgcttttttttcagccaactccaattttttttgcgctcctacggaagtcgggaagg

SEQ ID NO: 757 - DNA, 104 bp, synthetic construct
  source 1..104: mol_type = other DNA
gaaggggcactgtaagttttagagctacctgaaggtaaagatcgggtcctcttttttttcagccaactccaattttttttgaggacccgatctttaccttcagg

SEQ ID NO: 758 - DNA, 103 bp, synthetic construct
  source 1..103: mol_type = other DNA
gcaaaggcccagtcgttttagagctacctgaaggtaaagatcgggtcctcttttttttcagccaactccaattttttttgaggacccgatctttaccttcagg

SEQ ID NO: 759 - DNA, 104 bp, synthetic construct
  source 1..104: mol_type = other DNA
gcacggccccgccacgttttagagctacctgaaggtaaagatcgggtcctcttttttttcagccaactccaattttttttgaggacccgatctttaccttcagg

SEQ ID NO: 760 - DNA, 103 bp, synthetic construct
  source 1..103: mol_type = other DNA
gaacgcagctactggttttagagctacctgaaggtaaagatcgggtcctcttttttttcagccaactccaattttttttgaggacccgatctttaccttcagg

SEQ ID NO: 761 - DNA, 102 bp, synthetic construct
  source 1..102: mol_type = other DNA
gaaggggcactgtaagttttagagctacctggttatagcggacgcactgtttttttttcagccaactccaattttttttacagtgcgtccgctataaccagg

SEQ ID NO: 762 - DNA, 101 bp, synthetic construct
  source 1..101: mol_type = other DNA
gcaaaggcccagtcgttttagagctacctggttatagcggacgcactgtttttttttcagccaactccaattttttttacagtgcgtccgctataaccagg

SEQ ID NO: 763 - DNA, 102 bp, synthetic construct
  source 1..102: mol_type = other DNA
gcacggccccgccacgttttagagctacctggttatagcggacgcactgtttttttttcagccaactccaattttttttacagtgcgtccgctataaccagg

SEQ ID NO: 764 - DNA, 101 bp, synthetic construct
  source 1..101: mol_type = other DNA
gaacgcagctactggttttagagctacctggttatagcggacgcactgtttttttttcagccaactccaattttttttacagtgcgtccgctataaccagg

SEQ ID NO: 765 - DNA, 102 bp, synthetic construct
  source 1..102: mol_type = other DNA
gaaggggcactgtaagttttagagctaccgcatcgtattatctgcgaagcttttttttcagccaactccaattttttttgcttcgcagataatacgatgcgg

SEQ ID NO: 766 - DNA, 101 bp, synthetic construct
  source 1..101: mol_type = other DNA
gcaaaggcccagtcgttttagagctaccgcatcgtattatctgcgaagcttttttttcagccaactccaattttttttgcttcgcagataatacgatgcgg

SEQ ID NO: 767 - DNA, 102 bp, synthetic construct
  source 1..102: mol_type = other DNA
gcacggccccgccacgttttagagctaccgcatcgtattatctgcgaagcttttttttcagccaactccaattttttttgcttcgcagataatacgatgcgg

SEQ ID NO: 768 - DNA, 101 bp, synthetic construct
  source 1..101: mol_type = other DNA
gaacgcagctactggttttagagctaccgcatcgtattatctgcgaagcttttttttcagccaactccaattttttttgcttcgcagataatacgatgcgg

SEQ ID NO: 769 - DNA, 102 bp, synthetic construct
  source 1..102: mol_type = other DNA
gaaggggcactgtaagttttagagctaccgctaggacgttcaacggagtcttttttttcagccaactccaattttttttgactccgttgaacgtcctagcgg

SEQ ID NO: 770 - DNA, 101 bp, synthetic construct
  source 1..101: mol_type = other DNA
gcaaaggcccagtcgttttagagctaccgctaggacgttcaacggagtcttttttttcagccaactccaattttttttgactccgttgaacgtcctagcgg

SEQ ID NO: 771 - DNA, 102 bp, synthetic construct
  source 1..102: mol_type = other DNA
gcacggccccgccacgttttagagctaccgctaggacgttcaacggagtcttttttttcagccaactccaattttttttgactccgttgaacgtcctagcgg

SEQ ID NO: 772 - DNA, 101 bp, synthetic construct
  source 1..101: mol_type = other DNA
gaacgcagctactggttttagagctaccgctaggacgttcaacggagtcttttttttcagccaactccaattttttttgactccgttgaacgtcctagcgg

SEQ ID NO: 773 - DNA, 102 bp, synthetic construct
  source 1..102: mol_type = other DNA
gaaggggcactgtaagttttagagctaccatagcggtactatcggcatctttttttttcagccaactccaattttttttagatgccgatagtaccgctatgg

SEQ ID NO: 774 - DNA, 101 bp, synthetic construct
  source 1..101: mol_type = other DNA
gcaaaggcccagtcgttttagagctaccatagcggtactatcggcatctttttttttcagccaactccaattttttttagatgccgatagtaccgctatgg

SEQ ID NO: 775 - DNA, 102 bp, synthetic construct
  source 1..102: mol_type = other DNA
gcacggccccgccacgttttagagctaccatagcggtactatcggcatctttttttttcagccaactccaattttttttagatgccgatagtaccgctatgg

SEQ ID NO: 776 - DNA, 101 bp, synthetic construct
  source 1..101: mol_type = other DNA
gaacgcagctactggttttagagctaccatagcggtactatcggcatctttttttttcagccaactccaattttttttagatgccgatagtaccgctatgg

SEQ ID NO: 777 - DNA, 102 bp, synthetic construct
  source 1..102: mol_type = other DNA
gaaggggcactgtaagttttagagctacctcgtactagtctcgcatgaccttttttttcagccaactccaattttttttggtcatgcgagactagtacgagg

SEQ ID NO: 778 - DNA, 101 bp, synthetic construct
  source 1..101: mol_type = other DNA
gcaaaggcccagtcgttttagagctacctcgtactagtctcgcatgaccttttttttcagccaactccaattttttttggtcatgcgagactagtacgagg

SEQ ID NO: 779 - DNA, 102 bp, synthetic construct
  source 1..102: mol_type = other DNA
gcacggccccgccacgttttagagctacctcgtactagtctcgcatgaccttttttttcagccaactccaattttttttggtcatgcgagactagtacgagg

SEQ ID NO: 780 - DNA, 101 bp, synthetic construct
  source 1..101: mol_type = other DNA
gaacgcagctactggttttagagctacctcgtactagtctcgcatgaccttttttttcagccaactccaattttttttggtcatgcgagactagtacgagg

SEQ ID NO: 781 - DNA, 102 bp, synthetic construct
  source 1..102: mol_type = other DNA
gaaggggcactgtaagttttagagctaccgatagtgctaaacgacgctttttttttttcagccaactccaattttttttaaagcgtcgtttagcactatcgg

SEQ ID NO: 782 - DNA, 101 bp, synthetic construct
  source 1..101: mol_type = other DNA
gcaaaggcccagtcgttttagagctaccgatagtgctaaacgacgctttttttttttcagccaactccaattttttttaaagcgtcgtttagcactatcgg

SEQ ID NO: 783 - DNA, 102 bp, synthetic construct
  source 1..102: mol_type = other DNA
gcacggccccgccacgttttagagctaccgatagtgctaaacgacgctttttttttttcagccaactccaattttttttaaagcgtcgtttagcactatcgg

SEQ ID NO: 784 - DNA, 101 bp, synthetic construct
  source 1..101: mol_type = other DNA
gaacgcagctactggttttagagctaccgatagtgctaaacgacgctttttttttttcagccaactccaattttttttaaagcgtcgtttagcactatcgg

SEQ ID NO: 785 - DNA, 102 bp, synthetic construct
  source 1..102: mol_type = other DNA
gaaggggcactgtaagttttagagctacccgttatcgacgttcaaggaacttttttttcagccaactccaattttttttgttccttgaacgtcgataacggg

SEQ ID NO: 786 - DNA, 101 bp, synthetic construct
  source 1..101: mol_type = other DNA
gcaaaggcccagtcgttttagagctacccgttatcgacgttcaaggaacttttttttcagccaactccaattttttttgttccttgaacgtcgataacggg

SEQ ID NO: 787 - DNA, 102 bp, synthetic construct
  source 1..102: mol_type = other DNA
gcacggccccgccacgttttagagctacccgttatcgacgttcaaggaacttttttttcagccaactccaattttttttgttccttgaacgtcgataacggg

SEQ ID NO: 788 - DNA, 101 bp, synthetic construct
  source 1..101: mol_type = other DNA
gaacgcagctactggttttagagctacccgttatcgacgttcaaggaacttttttttcagccaactccaattttttttgttccttgaacgtcgataacggg

SEQ ID NO: 789 - DNA, 102 bp, synthetic construct
  source 1..102: mol_type = other DNA
gaaggggcactgtaagttttagagctaccgatcaatgcggtctgcgtaacttttttttcagccaactccaattttttttgttacgcagaccgcattgatcgg

SEQ ID NO: 790 - DNA, 101 bp, synthetic construct
  source 1..101: mol_type = other DNA
gcaaaggcccagtcgttttagagctaccgatcaatgcggtctgcgtaacttttttttcagccaactccaattttttttgttacgcagaccgcattgatcgg

SEQ ID NO: 791 - DNA, 102 bp, synthetic construct
  source 1..102: mol_type = other DNA
gcacggccccgccacgttttagagctaccgatcaatgcggtctgcgtaacttttttttcagccaactccaattttttttgttacgcagaccgcattgatcgg

SEQ ID NO: 792 - DNA, 101 bp, synthetic construct
  source 1..101: mol_type = other DNA
gaacgcagctactggttttagagctaccgatcaatgcggtctgcgtaacttttttttcagccaactccaattttttttgttacgcagaccgcattgatcgg

SEQ ID NO: 793 - DNA, 102 bp, synthetic construct
  source 1..102: mol_type = other DNA
gaaggggcactgtaagttttagagctacccttactcgcgatactctcgacttttttttcagccaactccaattttttttgtcgagagtatcgcgagtaaggg

SEQ ID NO: 794 - DNA, 101 bp, synthetic construct
  source 1..101: mol_type = other DNA
gcaaaggcccagtcgttttagagctacccttactcgcgatactctcgacttttttttcagccaactccaattttttttgtcgagagtatcgcgagtaaggg

SEQ ID NO: 795 - DNA, 102 bp, synthetic construct
  source 1..102: mol_type = other DNA
gcacggccccgccacgttttagagctacccttactcgcgatactctcgacttttttttcagccaactccaattttttttgtcgagagtatcgcgagtaaggg

SEQ ID NO: 796 - DNA, 101 bp, synthetic construct
  source 1..101: mol_type = other DNA
gaacgcagctactggttttagagctacccttactcgcgatactctcgacttttttttcagccaactccaattttttttgtcgagagtatcgcgagtaaggg

SEQ ID NO: 797 - DNA, 102 bp, synthetic construct
  source 1..102: mol_type = other DNA
gaaggggcactgtaagttttagagctaccgcggacggtaagcacggaatattttttttcagccaactccaatttttttttattccgtgcttaccgtccgcgg

SEQ ID NO: 798 - DNA, 101 bp, synthetic construct
  source 1..101: mol_type = other DNA
gcaaaggcccagtcgttttagagctaccgcggacggtaagcacggaatattttttttcagccaactccaatttttttttattccgtgcttaccgtccgcgg

SEQ ID NO: 799 - DNA, 102 bp, synthetic construct
  source 1..102: mol_type = other DNA
gcacggccccgccacgttttagagctaccgcggacggtaagcacggaatattttttttcagccaactccaatttttttttattccgtgcttaccgtccgcgg

SEQ ID NO: 800 - DNA, 101 bp, synthetic construct
  source 1..101: mol_type = other DNA
gaacgcagctactggttttagagctaccgcggacggtaagcacggaatattttttttcagccaactccaatttttttttattccgtgcttaccgtccgcgg

SEQ ID NO: 801 - DNA, 102 bp, synthetic construct
  source 1..102: mol_type = other DNA
gaaggggcactgtaagttttagagctacctatagtcacgaatcgtagggtttttttttcagccaactccaattttttttaccctacgattcgtgactatagg

SEQ ID NO: 802 - DNA, 101 bp, synthetic construct
  source 1..101: mol_type = other DNA
gcaaaggcccagtcgttttagagctacctatagtcacgaatcgtagggtttttttttcagccaactccaattttttttaccctacgattcgtgactatagg

SEQ ID NO: 803 - DNA, 102 bp, synthetic construct
  source 1..102: mol_type = other DNA
gcacggccccgccacgttttagagctacctatagtcacgaatcgtagggtttttttttcagccaactccaattttttttaccctacgattcgtgactatagg

SEQ ID NO: 804 - DNA, 101 bp, synthetic construct
  source 1..101: mol_type = other DNA
gaacgcagctactggttttagagctacctatagtcacgaatcgtagggtttttttttcagccaactccaattttttttaccctacgattcgtgactatagg

SEQ ID NO: 805 - DNA, 102 bp, synthetic construct
  source 1..102: mol_type = other DNA
gaaggggcactgtaagttttagagctacccgtcgtcacgtatgcgtagcattttttttcagccaactccaatttttttttgctacgcatacgtgacgacggg

SEQ ID NO: 806 - DNA, 101 bp, synthetic construct
  source 1..101: mol_type = other DNA
gcaaaggcccagtcgttttagagctacccgtcgtcacgtatgcgtagcattttttttcagccaactccaatttttttttgctacgcatacgtgacgacggg

SEQ ID NO: 807 - DNA, 102 bp, synthetic construct
  source 1..102: mol_type = other DNA
gcacggccccgccacgttttagagctacccgtcgtcacgtatgcgtagcattttttttcagccaactccaatttttttttgctacgcatacgtgacgacggg

SEQ ID NO: 808 - DNA, 101 bp, synthetic construct
  source 1..101: mol_type = other DNA
gaacgcagctactggttttagagctacccgtcgtcacgtatgcgtagcattttttttcagccaactccaatttttttttgctacgcatacgtgacgacggg

SEQ ID NO: 809 - DNA, 102 bp, synthetic construct
  source 1..102: mol_type = other DNA
gaaggggcactgtaagttttagagctacccgagaggtagtagacgacgcattttttttcagccaactccaatttttttttgcgtcgtctactacctctcggg

SEQ ID NO: 810 - DNA, 101 bp, synthetic construct
  source 1..101: mol_type = other DNA
gcaaaggcccagtcgttttagagctacccgagaggtagtagacgacgcattttttttcagccaactccaatttttttttgcgtcgtctactacctctcggg

SEQ ID NO: 811 - DNA, 102 bp, synthetic construct
  source 1..102: mol_type = other DNA
gcacggccccgccacgttttagagctacccgagaggtagtagacgacgcattttttttcagccaactccaatttttttttgcgtcgtctactacctctcggg

SEQ ID NO: 812 - DNA, 101 bp, synthetic construct
  source 1..101: mol_type = other DNA
gaacgcagctactggttttagagctacccgagaggtagtagacgacgcattttttttcagccaactccaatttttttttgcgtcgtctactacctctcggg

SEQ ID NO: 813 - DNA, 102 bp, synthetic construct
  source 1..102: mol_type = other DNA
gaaggggcactgtaagttttagagctaccgacgtctacggacgggagctattttttttcagccaactccaatttttttttagctcccgtccgtagacgtcgg

SEQ ID NO: 814 - DNA, 101 bp, synthetic construct
  source 1..101: mol_type = other DNA
gcaaaggcccagtcgttttagagctaccgacgtctacggacgggagctattttttttcagccaactccaatttttttttagctcccgtccgtagacgtcgg

SEQ ID NO: 815 - DNA, 102 bp, synthetic construct
  source 1..102: mol_type = other DNA
gcacggccccgccacgttttagagctaccgacgtctacggacgggagctattttttttcagccaactccaatttttttttagctcccgtccgtagacgtcgg

SEQ ID NO: 816 - DNA, 101 bp, synthetic construct
  source 1..101: mol_type = other DNA
gaacgcagctactggttttagagctaccgacgtctacggacgggagctattttttttcagccaactccaatttttttttagctcccgtccgtagacgtcgg

SEQ ID NO: 817 - DNA, 102 bp, synthetic construct
  source 1..102: mol_type = other DNA
gaaggggcactgtaagttttagagctaccaaagctcattcgcgactgagcttttttttcagccaactccaattttttttgctcagtcgcgaatgagctttgg

SEQ ID NO: 818 - DNA, 101 bp, synthetic construct
  source 1..101: mol_type = other DNA
gcaaaggcccagtcgttttagagctaccaaagctcattcgcgactgagcttttttttcagccaactccaattttttttgctcagtcgcgaatgagctttgg

SEQ ID NO: 819 - DNA, 102 bp, synthetic construct
  source 1..102: mol_type = other DNA
gcacggccccgccacgttttagagctaccaaagctcattcgcgactgagcttttttttcagccaactccaattttttttgctcagtcgcgaatgagctttgg

SEQ ID NO: 820 - DNA, 101 bp, synthetic construct
  source 1..101: mol_type = other DNA
gaacgcagctactggttttagagctaccaaagctcattcgcgactgagcttttttttcagccaactccaattttttttgctcagtcgcgaatgagctttgg

SEQ ID NO: 821 - DNA, 102 bp, synthetic construct
  source 1..102: mol_type = other DNA
gaaggggcactgtaagttttagagctaccatggcacgatcgacacggaggttttttttcagccaactccaattttttttcctccgtgtcgatcgtgccatgg

SEQ ID NO: 822 - DNA, 101 bp, synthetic construct
  source 1..101: mol_type = other DNA
gcaaaggcccagtcgttttagagctaccatggcacgatcgacacggaggttttttttcagccaactccaattttttttcctccgtgtcgatcgtgccatgg

SEQ ID NO: 823 - DNA, 102 bp, synthetic construct
  source 1..102: mol_type = other DNA
gcacggccccgccacgttttagagctaccatggcacgatcgacacggaggttttttttcagccaactccaattttttttcctccgtgtcgatcgtgccatgg

SEQ ID NO: 824 - DNA, 101 bp, synthetic construct
  source 1..101: mol_type = other DNA
gaacgcagctactggttttagagctaccatggcacgatcgacacggaggttttttttcagccaactccaattttttttcctccgtgtcgatcgtgccatgg

SEQ ID NO: 825 - DNA, 102 bp, synthetic construct
  source 1..102: mol_type = other DNA
gaaggggcactgtaagttttagagctacccgaactctctatcgaacgagtttttttttcagccaactccaattttttttactcgttcgatagagagttcggg

SEQ ID NO: 826 - DNA, 101 bp, synthetic construct
  source 1..101: mol_type = other DNA
gcaaaggcccagtcgttttagagctacccgaactctctatcgaacgagtttttttttcagccaactccaattttttttactcgttcgatagagagttcggg

SEQ ID NO: 827 - DNA, 102 bp, synthetic construct
  source 1..102: mol_type = other DNA
gcacggccccgccacgttttagagctacccgaactctctatcgaacgagtttttttttcagccaactccaattttttttactcgttcgatagagagttcggg

SEQ ID NO: 828 - DNA, 101 bp, synthetic construct
  source 1..101: mol_type = other DNA
gaacgcagctactggttttagagctacccgaactctctatcgaacgagtttttttttcagccaactccaattttttttactcgttcgatagagagttcggg

SEQ ID NO: 829 - DNA, 104 bp, synthetic construct
  source 1..104: mol_type = other DNA
gacccggctctataagttttagagctaccgtcgttgtaccgtctacttgacttttttttcagccaactccaattttttttgtcaagtagacggtacaacgacgg

SEQ ID NO: 830 - DNA, 104 bp, synthetic construct
  source 1..104: mol_type = other DNA
gctccgattggcccggttttagagctaccgtcgttgtaccgtctacttgacttttttttcagccaactccaattttttttgtcaagtagacggtacaacgacgg

SEQ ID NO: 831 - DNA, 103 bp, synthetic construct
  source 1..103: mol_type = other DNA
gcagtgccccgtgagttttagagctaccgtcgttgtaccgtctacttgacttttttttcagccaactccaattttttttgtcaagtagacggtacaacgacgg

SEQ ID NO: 832 - DNA, 104 bp, synthetic construct
  source 1..104: mol_type = other DNA
gaggagattgacagcgttttagagctaccgtcgttgtaccgtctacttgacttttttttcagccaactccaattttttttgtcaagtagacggtacaacgacgg

SEQ ID NO: 833 - DNA, 102 bp, synthetic construct
  source 1..102: mol_type = other DNA
gacccggctctataagttttagagctacctacactcgacatcggtagctattttttttcagccaactccaatttttttttagctaccgatgtcgagtgtagg

SEQ ID NO: 834 - DNA, 102 bp, synthetic construct
  source 1..102: mol_type = other DNA
gctccgattggcccggttttagagctacctacactcgacatcggtagctattttttttcagccaactccaatttttttttagctaccgatgtcgagtgtagg

SEQ ID NO: 835 - DNA, 101 bp, synthetic construct
  source 1..101: mol_type = other DNA
gcagtgccccgtgagttttagagctacctacactcgacatcggtagctattttttttcagccaactccaatttttttttagctaccgatgtcgagtgtagg

SEQ ID NO: 836 - DNA, 102 bp, synthetic construct
  source 1..102: mol_type = other DNA
gaggagattgacagcgttttagagctacctacactcgacatcggtagctattttttttcagccaactccaatttttttttagctaccgatgtcgagtgtagg

SEQ ID NO: 837 - DNA, 102 bp, synthetic construct
  source 1..102: mol_type = other DNA
gacccggctctataagttttagagctaccctggcggaacgttcgagtaatttttttttcagccaactccaattttttttattactcgaacgttccgccaggg

SEQ ID NO: 838 - DNA, 102 bp, synthetic construct
  source 1..102: mol_type = other DNA
gctccgattggcccggttttagagctaccctggcggaacgttcgagtaatttttttttcagccaactccaattttttttattactcgaacgttccgccaggg

SEQ ID NO: 839 - DNA, 101 bp, synthetic construct
  source 1..101: mol_type = other DNA
gcagtgccccgtgagttttagagctaccctggcggaacgttcgagtaatttttttttcagccaactccaattttttttattactcgaacgttccgccaggg

SEQ ID NO: 840 - DNA, 102 bp, synthetic construct
  source 1..102: mol_type = other DNA
gaggagattgacagcgttttagagctaccctggcggaacgttcgagtaatttttttttcagccaactccaattttttttattactcgaacgttccgccaggg

SEQ ID NO: 841 - DNA, 102 bp, synthetic construct
  source 1..102: mol_type = other DNA
gacccggctctataagttttagagctacctacacgatagtggtcgtgcgcttttttttcagccaactccaattttttttgcgcacgaccactatcgtgtagg

SEQ ID NO: 842 - DNA, 102 bp, synthetic construct
  source 1..102: mol_type = other DNA
gctccgattggcccggttttagagctacctacacgatagtggtcgtgcgcttttttttcagccaactccaattttttttgcgcacgaccactatcgtgtagg

SEQ ID NO: 843 - DNA, 101 bp, synthetic construct
  source 1..101: mol_type = other DNA
gcagtgccccgtgagttttagagctacctacacgatagtggtcgtgcgcttttttttcagccaactccaattttttttgcgcacgaccactatcgtgtagg

SEQ ID NO: 844 - DNA, 102 bp, synthetic construct
  source 1..102: mol_type = other DNA
gaggagattgacagcgttttagagctacctacacgatagtggtcgtgcgcttttttttcagccaactccaattttttttgcgcacgaccactatcgtgtagg

SEQ ID NO: 845 - DNA, 104 bp, synthetic construct
  source 1..104: mol_type = other DNA
gacccggctctataagttttagagctaccttcccgacttccgtaggagcgcttttttttcagccaactccaattttttttgcgctcctacggaagtcgggaagg

SEQ ID NO: 846 - DNA, 104 bp, synthetic construct
  source 1..104: mol_type = other DNA
gctccgattggcccggttttagagctaccttcccgacttccgtaggagcgcttttttttcagccaactccaattttttttgcgctcctacggaagtcgggaagg

SEQ ID NO: 847 - DNA, 103 bp, synthetic construct
  source 1..103: mol_type = other DNA
gcagtgccccgtgagttttagagctaccttcccgacttccgtaggagcgcttttttttcagccaactccaattttttttgcgctcctacggaagtcgggaagg

SEQ ID NO: 848 - DNA, 104 bp, synthetic construct
  source 1..104: mol_type = other DNA
gaggagattgacagcgttttagagctaccttcccgacttccgtaggagcgcttttttttcagccaactccaattttttttgcgctcctacggaagtcgggaagg

SEQ ID NO: 849 - DNA, 104 bp, synthetic construct
  source 1..104: mol_type = other DNA
gacccggctctataagttttagagctacctgaaggtaaagatcgggtcctcttttttttcagccaactccaattttttttgaggacccgatctttaccttcagg

SEQ ID NO: 850 - DNA, 104 bp, synthetic construct
  source 1..104: mol_type = other DNA
gctccgattggcccggttttagagctacctgaaggtaaagatcgggtcctcttttttttcagccaactccaattttttttgaggacccgatctttaccttcagg

SEQ ID NO: 851 - DNA, 103 bp, synthetic construct
  source 1..103: mol_type = other DNA
gcagtgccccgtgagttttagagctacctgaaggtaaagatcgggtcctcttttttttcagccaactccaattttttttgaggacccgatctttaccttcagg

SEQ ID NO: 852 - DNA, 104 bp, synthetic construct
  source 1..104: mol_type = other DNA
gaggagattgacagcgttttagagctacctgaaggtaaagatcgggtcctcttttttttcagccaactccaattttttttgaggacccgatctttaccttcagg

SEQ ID NO: 853 - DNA, 102 bp, synthetic construct
  source 1..102: mol_type = other DNA
gacccggctctataagttttagagctacctggttatagcggacgcactgtttttttttcagccaactccaattttttttacagtgcgtccgctataaccagg

SEQ ID NO: 854 - DNA, 102 bp, synthetic construct
  source 1..102: mol_type = other DNA
gctccgattggcccggttttagagctacctggttatagcggacgcactgtttttttttcagccaactccaattttttttacagtgcgtccgctataaccagg

SEQ ID NO: 855 - DNA, 101 bp, synthetic construct
  source 1..101: mol_type = other DNA
gcagtgccccgtgagttttagagctacctggttatagcggacgcactgtttttttttcagccaactccaattttttttacagtgcgtccgctataaccagg

SEQ ID NO: 856 - DNA, 102 bp, synthetic construct
  source 1..102: mol_type = other DNA
gaggagattgacagcgttttagagctacctggttatagcggacgcactgtttttttttcagccaactccaattttttttacagtgcgtccgctataaccagg

SEQ ID NO: 857 - DNA, 102 bp, synthetic construct
  source 1..102: mol_type = other DNA
gacccggctctataagttttagagctaccgcatcgtattatctgcgaagcttttttttcagccaactccaattttttttgcttcgcagataatacgatgcgg

SEQ ID NO: 858 - DNA, 102 bp, synthetic construct
  source 1..102: mol_type = other DNA
gctccgattggcccggttttagagctaccgcatcgtattatctgcgaagcttttttttcagccaactccaattttttttgcttcgcagataatacgatgcgg

SEQ ID NO: 859 - DNA, 101 bp, synthetic construct
  source 1..101: mol_type = other DNA
gcagtgccccgtgagttttagagctaccgcatcgtattatctgcgaagcttttttttcagccaactccaattttttttgcttcgcagataatacgatgcgg

SEQ ID NO: 860 - DNA, 102 bp, synthetic construct
  source 1..102: mol_type = other DNA
gaggagattgacagcgttttagagctaccgcatcgtattatctgcgaagcttttttttcagccaactccaattttttttgcttcgcagataatacgatgcgg

SEQ ID NO: 861 - DNA, 102 bp, synthetic construct
  source 1..102: mol_type = other DNA
gacccggctctataagttttagagctaccgctaggacgttcaacggagtcttttttttcagccaactccaattttttttgactccgttgaacgtcctagcgg

SEQ ID NO: 862 - DNA, 102 bp, synthetic construct
  source 1..102: mol_type = other DNA
gctccgattggcccggttttagagctaccgctaggacgttcaacggagtcttttttttcagccaactccaattttttttgactccgttgaacgtcctagcgg

SEQ ID NO: 863 - DNA, 101 bp, synthetic construct
  source 1..101: mol_type = other DNA
gcagtgccccgtgagttttagagctaccgctaggacgttcaacggagtcttttttttcagccaactccaattttttttgactccgttgaacgtcctagcgg

SEQ ID NO: 864 - DNA, 102 bp, synthetic construct
  source 1..102: mol_type = other DNA
gaggagattgacagcgttttagagctaccgctaggacgttcaacggagtcttttttttcagccaactccaattttttttgactccgttgaacgtcctagcgg

SEQ ID NO: 865 - DNA, 102 bp, synthetic construct
  source 1..102: mol_type = other DNA
gacccggctctataagttttagagctaccatagcggtactatcggcatctttttttttcagccaactccaattttttttagatgccgatagtaccgctatgg

SEQ ID NO: 866 - DNA, 102 bp, synthetic construct
  source 1..102: mol_type = other DNA
gctccgattggcccggttttagagctaccatagcggtactatcggcatctttttttttcagccaactccaattttttttagatgccgatagtaccgctatgg

SEQ ID NO: 867 - DNA, 101 bp, synthetic construct
  source 1..101: mol_type = other DNA
gcagtgccccgtgagttttagagctaccatagcggtactatcggcatctttttttttcagccaactccaattttttttagatgccgatagtaccgctatgg

SEQ ID NO: 868 - DNA, 102 bp, synthetic construct
  source 1..102: mol_type = other DNA
gaggagattgacagcgttttagagctaccatagcggtactatcggcatctttttttttcagccaactccaattttttttagatgccgatagtaccgctatgg

SEQ ID NO: 869 - DNA, 102 bp, synthetic construct
  source 1..102: mol_type = other DNA
gacccggctctataagttttagagctacctcgtactagtctcgcatgaccttttttttcagccaactccaattttttttggtcatgcgagactagtacgagg

SEQ ID NO: 870 - DNA, 102 bp, synthetic construct
  source 1..102: mol_type = other DNA
gctccgattggcccggttttagagctacctcgtactagtctcgcatgaccttttttttcagccaactccaattttttttggtcatgcgagactagtacgagg

SEQ ID NO: 871 - DNA, 101 bp, synthetic construct
  source 1..101: mol_type = other DNA
gcagtgccccgtgagttttagagctacctcgtactagtctcgcatgaccttttttttcagccaactccaattttttttggtcatgcgagactagtacgagg

SEQ ID NO: 872 - DNA, 102 bp, synthetic construct
  source 1..102: mol_type = other DNA
gaggagattgacagcgttttagagctacctcgtactagtctcgcatgaccttttttttcagccaactccaattttttttggtcatgcgagactagtacgagg

SEQ ID NO: 873 - DNA, 102 bp, synthetic construct
  source 1..102: mol_type = other DNA
gacccggctctataagttttagagctaccgatagtgctaaacgacgctttttttttttcagccaactccaattttttttaaagcgtcgtttagcactatcgg

SEQ ID NO: 874 - DNA, 102 bp, synthetic construct
  source 1..102: mol_type = other DNA
gctccgattggcccggttttagagctaccgatagtgctaaacgacgctttttttttttcagccaactccaattttttttaaagcgtcgtttagcactatcgg

SEQ ID NO: 875 - DNA, 101 bp, synthetic construct
  source 1..101: mol_type = other DNA
gcagtgccccgtgagttttagagctaccgatagtgctaaacgacgctttttttttttcagccaactccaattttttttaaagcgtcgtttagcactatcgg

SEQ ID NO: 876 - DNA, 102 bp, synthetic construct
  source 1..102: mol_type = other DNA
gaggagattgacagcgttttagagctaccgatagtgctaaacgacgctttttttttttcagccaactccaattttttttaaagcgtcgtttagcactatcgg

SEQ ID NO: 877 - DNA, 102 bp, synthetic construct
  source 1..102: mol_type = other DNA
gacccggctctataagttttagagctacccgttatcgacgttcaaggaacttttttttcagccaactccaattttttttgttccttgaacgtcgataacggg

SEQ ID NO: 878 - DNA, 102 bp, synthetic construct
  source 1..102: mol_type = other DNA
gctccgattggcccggttttagagctacccgttatcgacgttcaaggaacttttttttcagccaactccaattttttttgttccttgaacgtcgataacggg

SEQ ID NO: 879 - DNA, 101 bp, synthetic construct
  source 1..101: mol_type = other DNA
gcagtgccccgtgagttttagagctacccgttatcgacgttcaaggaacttttttttcagccaactccaattttttttgttccttgaacgtcgataacggg

SEQ ID NO: 880 - DNA, 102 bp, synthetic construct
  source 1..102: mol_type = other DNA
gaggagattgacagcgttttagagctacccgttatcgacgttcaaggaacttttttttcagccaactccaattttttttgttccttgaacgtcgataacggg

SEQ ID NO: 881 - DNA, 102 bp, synthetic construct
  source 1..102: mol_type = other DNA
gacccggctctataagttttagagctaccgatcaatgcggtctgcgtaacttttttttcagccaactccaattttttttgttacgcagaccgcattgatcgg

SEQ ID NO: 882 - DNA, 102 bp, synthetic construct
  source 1..102: mol_type = other DNA
gctccgattggcccggttttagagctaccgatcaatgcggtctgcgtaacttttttttcagccaactccaattttttttgttacgcagaccgcattgatcgg

SEQ ID NO: 883 - DNA, 101 bp, synthetic construct
  source 1..101: mol_type = other DNA
gcagtgccccgtgagttttagagctaccgatcaatgcggtctgcgtaacttttttttcagccaactccaattttttttgttacgcagaccgcattgatcgg

SEQ ID NO: 884 - DNA, 102 bp, synthetic construct
  source 1..102: mol_type = other DNA
gaggagattgacagcgttttagagctaccgatcaatgcggtctgcgtaacttttttttcagccaactccaattttttttgttacgcagaccgcattgatcgg

SEQ ID NO: 885 - DNA, 102 bp, synthetic construct
  source 1..102: mol_type = other DNA
gacccggctctataagttttagagctacccttactcgcgatactctcgacttttttttcagccaactccaattttttttgtcgagagtatcgcgagtaaggg

SEQ ID NO: 886 - DNA, 102 bp, synthetic construct
  source 1..102: mol_type = other DNA
gctccgattggcccggttttagagctacccttactcgcgatactctcgacttttttttcagccaactccaattttttttgtcgagagtatcgcgagtaaggg

SEQ ID NO: 887 - DNA, 101 bp, synthetic construct
  source 1..101: mol_type = other DNA
gcagtgccccgtgagttttagagctacccttactcgcgatactctcgacttttttttcagccaactccaattttttttgtcgagagtatcgcgagtaaggg

SEQ ID NO: 888 - DNA, 102 bp, synthetic construct
  source 1..102: mol_type = other DNA
gaggagattgacagcgttttagagctacccttactcgcgatactctcgacttttttttcagccaactccaattttttttgtcgagagtatcgcgagtaaggg

SEQ ID NO: 889 - DNA, 102 bp, synthetic construct
  source 1..102: mol_type = other DNA
gacccggctctataagttttagagctaccgcggacggtaagcacggaatattttttttcagccaactccaatttttttttattccgtgcttaccgtccgcgg

SEQ ID NO: 890 - DNA, 102 bp, synthetic construct
  source 1..102: mol_type = other DNA
gctccgattggcccggttttagagctaccgcggacggtaagcacggaatattttttttcagccaactccaatttttttttattccgtgcttaccgtccgcgg

SEQ ID NO: 891 - DNA, 101 bp, synthetic construct
  source 1..101: mol_type = other DNA
gcagtgccccgtgagttttagagctaccgcggacggtaagcacggaatattttttttcagccaactccaatttttttttattccgtgcttaccgtccgcgg

SEQ ID NO: 892 - DNA, 102 bp, synthetic construct
  source 1..102: mol_type = other DNA
gaggagattgacagcgttttagagctaccgcggacggtaagcacggaatattttttttcagccaactccaatttttttttattccgtgcttaccgtccgcgg

SEQ ID NO: 893 - DNA, 102 bp, synthetic construct
  source 1..102: mol_type = other DNA
gacccggctctataagttttagagctacctatagtcacgaatcgtagggtttttttttcagccaactccaattttttttaccctacgattcgtgactatagg

SEQ ID NO: 894 - DNA, 102 bp, synthetic construct
  source 1..102: mol_type = other DNA
gctccgattggcccggttttagagctacctatagtcacgaatcgtagggtttttttttcagccaactccaattttttttaccctacgattcgtgactatagg

SEQ ID NO: 895 - DNA, 101 bp, synthetic construct
  source 1..101: mol_type = other DNA
gcagtgccccgtgagttttagagctacctatagtcacgaatcgtagggtttttttttcagccaactccaattttttttaccctacgattcgtgactatagg

SEQ ID NO: 896 - DNA, 102 bp, synthetic construct
  source 1..102: mol_type = other DNA
gaggagattgacagcgttttagagctacctatagtcacgaatcgtagggtttttttttcagccaactccaattttttttaccctacgattcgtgactatagg

SEQ ID NO: 897 - DNA, 102 bp, synthetic construct
  source 1..102: mol_type = other DNA
gacccggctctataagttttagagctacccgtcgtcacgtatgcgtagcattttttttcagccaactccaatttttttttgctacgcatacgtgacgacggg

SEQ ID NO: 898 - DNA, 102 bp, synthetic construct
  source 1..102: mol_type = other DNA
gctccgattggcccggttttagagctacccgtcgtcacgtatgcgtagcattttttttcagccaactccaatttttttttgctacgcatacgtgacgacggg

SEQ ID NO: 899 - DNA, 101 bp, synthetic construct
  source 1..101: mol_type = other DNA
gcagtgccccgtgagttttagagctacccgtcgtcacgtatgcgtagcattttttttcagccaactccaatttttttttgctacgcatacgtgacgacggg

SEQ ID NO: 900 - DNA, 102 bp, synthetic construct
  source 1..102: mol_type = other DNA
gaggagattgacagcgttttagagctacccgtcgtcacgtatgcgtagcattttttttcagccaactccaatttttttttgctacgcatacgtgacgacggg

SEQ ID NO: 901 - DNA, 102 bp, synthetic construct
  source 1..102: mol_type = other DNA
gacccggctctataagttttagagctacccgagaggtagtagacgacgcattttttttcagccaactccaatttttttttgcgtcgtctactacctctcggg

SEQ ID NO: 902 - DNA, 102 bp, synthetic construct
  source 1..102: mol_type = other DNA
gctccgattggcccggttttagagctacccgagaggtagtagacgacgcattttttttcagccaactccaatttttttttgcgtcgtctactacctctcggg

SEQ ID NO: 903 - DNA, 101 bp, synthetic construct
  source 1..101: mol_type = other DNA
gcagtgccccgtgagttttagagctacccgagaggtagtagacgacgcattttttttcagccaactccaatttttttttgcgtcgtctactacctctcggg

SEQ ID NO: 904 - DNA, 102 bp, synthetic construct
  source 1..102: mol_type = other DNA
gaggagattgacagcgttttagagctacccgagaggtagtagacgacgcattttttttcagccaactccaatttttttttgcgtcgtctactacctctcggg

SEQ ID NO: 905 - DNA, 102 bp, synthetic construct
  source 1..102: mol_type = other DNA
gacccggctctataagttttagagctaccgacgtctacggacgggagctattttttttcagccaactccaatttttttttagctcccgtccgtagacgtcgg

SEQ ID NO: 906 - DNA, 102 bp, synthetic construct
  source 1..102: mol_type = other DNA
gctccgattggcccggttttagagctaccgacgtctacggacgggagctattttttttcagccaactccaatttttttttagctcccgtccgtagacgtcgg

SEQ ID NO: 907 - DNA, 101 bp, synthetic construct
  source 1..101: mol_type = other DNA
gcagtgccccgtgagttttagagctaccgacgtctacggacgggagctattttttttcagccaactccaatttttttttagctcccgtccgtagacgtcgg

SEQ ID NO: 908 - DNA, 102 bp, synthetic construct
  source 1..102: mol_type = other DNA
gaggagattgacagcgttttagagctaccgacgtctacggacgggagctattttttttcagccaactccaatttttttttagctcccgtccgtagacgtcgg

SEQ ID NO: 909 - DNA, 102 bp, synthetic construct
  source 1..102: mol_type = other DNA
gacccggctctataagttttagagctaccaaagctcattcgcgactgagcttttttttcagccaactccaattttttttgctcagtcgcgaatgagctttgg

SEQ ID NO: 910 - DNA, 102 bp, synthetic construct
  source 1..102: mol_type = other DNA
gctccgattggcccggttttagagctaccaaagctcattcgcgactgagcttttttttcagccaactccaattttttttgctcagtcgcgaatgagctttgg

SEQ ID NO: 911 - DNA, 101 bp, synthetic construct
  source 1..101: mol_type = other DNA
gcagtgccccgtgagttttagagctaccaaagctcattcgcgactgagcttttttttcagccaactccaattttttttgctcagtcgcgaatgagctttgg

SEQ ID NO: 912 - DNA, 102 bp, synthetic construct
  source 1..102: mol_type = other DNA
gaggagattgacagcgttttagagctaccaaagctcattcgcgactgagcttttttttcagccaactccaattttttttgctcagtcgcgaatgagctttgg

SEQ ID NO: 913 - DNA, 102 bp, synthetic construct
  source 1..102: mol_type = other DNA
gacccggctctataagttttagagctaccatggcacgatcgacacggaggttttttttcagccaactccaattttttttcctccgtgtcgatcgtgccatgg

SEQ ID NO: 914 - DNA, 102 bp, synthetic construct
  source 1..102: mol_type = other DNA
gctccgattggcccggttttagagctaccatggcacgatcgacacggaggttttttttcagccaactccaattttttttcctccgtgtcgatcgtgccatgg

SEQ ID NO: 915 - DNA, 101 bp, synthetic construct
  source 1..101: mol_type = other DNA
gcagtgccccgtgagttttagagctaccatggcacgatcgacacggaggttttttttcagccaactccaattttttttcctccgtgtcgatcgtgccatgg

SEQ ID NO: 916 - DNA, 102 bp, synthetic construct
  source 1..102: mol_type = other DNA
gaggagattgacagcgttttagagctaccatggcacgatcgacacggaggttttttttcagccaactccaattttttttcctccgtgtcgatcgtgccatgg

SEQ ID NO: 917 - DNA, 102 bp, synthetic construct
  source 1..102: mol_type = other DNA
gacccggctctataagttttagagctacccgaactctctatcgaacgagtttttttttcagccaactccaattttttttactcgttcgatagagagttcggg

SEQ ID NO: 918 - DNA, 102 bp, synthetic construct
  source 1..102: mol_type = other DNA
gctccgattggcccggttttagagctacccgaactctctatcgaacgagtttttttttcagccaactccaattttttttactcgttcgatagagagttcggg

SEQ ID NO: 919 - DNA, 101 bp, synthetic construct
  source 1..101: mol_type = other DNA
gcagtgccccgtgagttttagagctacccgaactctctatcgaacgagtttttttttcagccaactccaattttttttactcgttcgatagagagttcggg

SEQ ID NO: 920 - DNA, 102 bp, synthetic construct
  source 1..102: mol_type = other DNA
gaggagattgacagcgttttagagctacccgaactctctatcgaacgagtttttttttcagccaactccaattttttttactcgttcgatagagagttcggg

SEQ ID NO: 921 - DNA, 104 bp, synthetic construct
  source 1..104: mol_type = other DNA
gcgtgcgcaggcgtcgttttagagctaccgtcgttgtaccgtctacttgacttttttttcagccaactccaattttttttgtcaagtagacggtacaacgacgg

SEQ ID NO: 922 - DNA, 104 bp, synthetic construct
  source 1..104: mol_type = other DNA
gtagcatcactaactgttttagagctaccgtcgttgtaccgtctacttgacttttttttcagccaactccaattttttttgtcaagtagacggtacaacgacgg

SEQ ID NO: 923 - DNA, 103 bp, synthetic construct
  source 1..103: mol_type = other DNA
gcggagtctctaacgttttagagctaccgtcgttgtaccgtctacttgacttttttttcagccaactccaattttttttgtcaagtagacggtacaacgacgg

SEQ ID NO: 924 - DNA, 103 bp, synthetic construct
  source 1..103: mol_type = other DNA
gacgagcaaggcgtgttttagagctaccgtcgttgtaccgtctacttgacttttttttcagccaactccaattttttttgtcaagtagacggtacaacgacgg

SEQ ID NO: 925 - DNA, 102 bp, synthetic construct
  source 1..102: mol_type = other DNA
gcgtgcgcaggcgtcgttttagagctacctacactcgacatcggtagctattttttttcagccaactccaatttttttttagctaccgatgtcgagtgtagg

SEQ ID NO: 926 - DNA, 102 bp, synthetic construct
  source 1..102: mol_type = other DNA
gtagcatcactaactgttttagagctacctacactcgacatcggtagctattttttttcagccaactccaatttttttttagctaccgatgtcgagtgtagg

SEQ ID NO: 927 - DNA, 101 bp, synthetic construct
  source 1..101: mol_type = other DNA
gcggagtctctaacgttttagagctacctacactcgacatcggtagctattttttttcagccaactccaatttttttttagctaccgatgtcgagtgtagg

SEQ ID NO: 928 - DNA, 101 bp, synthetic construct
  source 1..101: mol_type = other DNA
gacgagcaaggcgtgttttagagctacctacactcgacatcggtagctattttttttcagccaactccaatttttttttagctaccgatgtcgagtgtagg

SEQ ID NO: 929 - DNA, 102 bp, synthetic construct
  source 1..102: mol_type = other DNA
gcgtgcgcaggcgtcgttttagagctaccctggcggaacgttcgagtaatttttttttcagccaactccaattttttttattactcgaacgttccgccaggg

SEQ ID NO: 930 - DNA, 102 bp, synthetic construct
  source 1..102: mol_type = other DNA
gtagcatcactaactgttttagagctaccctggcggaacgttcgagtaatttttttttcagccaactccaattttttttattactcgaacgttccgccaggg

SEQ ID NO: 931 - DNA, 101 bp, synthetic construct
  source 1..101: mol_type = other DNA
gcggagtctctaacgttttagagctaccctggcggaacgttcgagtaatttttttttcagccaactccaattttttttattactcgaacgttccgccaggg

SEQ ID NO: 932 - DNA, 101 bp, synthetic construct
  source 1..101: mol_type = other DNA
gacgagcaaggcgtgttttagagctaccctggcggaacgttcgagtaatttttttttcagccaactccaattttttttattactcgaacgttccgccaggg

SEQ ID NO: 933 - DNA, 102 bp, synthetic construct
  source 1..102: mol_type = other DNA
gcgtgcgcaggcgtcgttttagagctacctacacgatagtggtcgtgcgcttttttttcagccaactccaattttttttgcgcacgaccactatcgtgtagg

SEQ ID NO: 934 - DNA, 102 bp, synthetic construct
  source 1..102: mol_type = other DNA
gtagcatcactaactgttttagagctacctacacgatagtggtcgtgcgcttttttttcagccaactccaattttttttgcgcacgaccactatcgtgtagg

SEQ ID NO: 935 - DNA, 101 bp, synthetic construct
  source 1..101: mol_type = other DNA
gcggagtctctaacgttttagagctacctacacgatagtggtcgtgcgcttttttttcagccaactccaattttttttgcgcacgaccactatcgtgtagg

SEQ ID NO: 936 - DNA, 101 bp, synthetic construct
  source 1..101: mol_type = other DNA
gacgagcaaggcgtgttttagagctacctacacgatagtggtcgtgcgcttttttttcagccaactccaattttttttgcgcacgaccactatcgtgtagg

SEQ ID NO: 937 - DNA, 104 bp, synthetic construct
  source 1..104: mol_type = other DNA
gcgtgcgcaggcgtcgttttagagctaccttcccgacttccgtaggagcgcttttttttcagccaactccaattttttttgcgctcctacggaagtcgggaagg

SEQ ID NO: 938 - DNA, 104 bp, synthetic construct
  source 1..104: mol_type = other DNA
gtagcatcactaactgttttagagctaccttcccgacttccgtaggagcgcttttttttcagccaactccaattttttttgcgctcctacggaagtcgggaagg

SEQ ID NO: 939 - DNA, 103 bp, synthetic construct
  source 1..103: mol_type = other DNA
gcggagtctctaacgttttagagctaccttcccgacttccgtaggagcgcttttttttcagccaactccaattttttttgcgctcctacggaagtcgggaagg

SEQ ID NO: 940 - DNA, 103 bp, synthetic construct
  source 1..103: mol_type = other DNA
gacgagcaaggcgtgttttagagctaccttcccgacttccgtaggagcgcttttttttcagccaactccaattttttttgcgctcctacggaagtcgggaagg

SEQ ID NO: 941 - DNA, 104 bp, synthetic construct
  source 1..104: mol_type = other DNA
gcgtgcgcaggcgtcgttttagagctacctgaaggtaaagatcgggtcctcttttttttcagccaactccaattttttttgaggacccgatctttaccttcagg

SEQ ID NO: 942 - DNA, 104 bp, synthetic construct
  source 1..104: mol_type = other DNA
gtagcatcactaactgttttagagctacctgaaggtaaagatcgggtcctcttttttttcagccaactccaattttttttgaggacccgatctttaccttcagg

SEQ ID NO: 943 - DNA, 103 bp, synthetic construct
  source 1..103: mol_type = other DNA
gcggagtctctaacgttttagagctacctgaaggtaaagatcgggtcctcttttttttcagccaactccaattttttttgaggacccgatctttaccttcagg

SEQ ID NO: 944 - DNA, 103 bp, synthetic construct
  source 1..103: mol_type = other DNA
gacgagcaaggcgtgttttagagctacctgaaggtaaagatcgggtcctcttttttttcagccaactccaattttttttgaggacccgatctttaccttcagg

SEQ ID NO: 945 - DNA, 102 bp, synthetic construct
  source 1..102: mol_type = other DNA
gcgtgcgcaggcgtcgttttagagctacctggttatagcggacgcactgtttttttttcagccaactccaattttttttacagtgcgtccgctataaccagg

SEQ ID NO: 946 - DNA, 102 bp, synthetic construct
  source 1..102: mol_type = other DNA
gtagcatcactaactgttttagagctacctggttatagcggacgcactgtttttttttcagccaactccaattttttttacagtgcgtccgctataaccagg

SEQ ID NO: 947 - DNA, 101 bp, synthetic construct
  source 1..101: mol_type = other DNA
gcggagtctctaacgttttagagctacctggttatagcggacgcactgtttttttttcagccaactccaattttttttacagtgcgtccgctataaccagg

SEQ ID NO: 948 - DNA, 101 bp, synthetic construct
  source 1..101: mol_type = other DNA
gacgagcaaggcgtgttttagagctacctggttatagcggacgcactgtttttttttcagccaactccaattttttttacagtgcgtccgctataaccagg

SEQ ID NO: 949 - DNA, 102 bp, synthetic construct
  source 1..102: mol_type = other DNA
gcgtgcgcaggcgtcgttttagagctaccgcatcgtattatctgcgaagcttttttttcagccaactccaattttttttgcttcgcagataatacgatgcgg

SEQ ID NO: 950 - DNA, 102 bp, synthetic construct
  source 1..102: mol_type = other DNA
gtagcatcactaactgttttagagctaccgcatcgtattatctgcgaagcttttttttcagccaactccaattttttttgcttcgcagataatacgatgcgg

SEQ ID NO: 951 - DNA, 101 bp, synthetic construct
  source 1..101: mol_type = other DNA
gcggagtctctaacgttttagagctaccgcatcgtattatctgcgaagcttttttttcagccaactccaattttttttgcttcgcagataatacgatgcgg

SEQ ID NO: 952 - DNA, 101 bp, synthetic construct
  source 1..101: mol_type = other DNA
gacgagcaaggcgtgttttagagctaccgcatcgtattatctgcgaagcttttttttcagccaactccaattttttttgcttcgcagataatacgatgcgg

SEQ ID NO: 953 - DNA, 102 bp, synthetic construct
  source 1..102: mol_type = other DNA
gcgtgcgcaggcgtcgttttagagctaccgctaggacgttcaacggagtcttttttttcagccaactccaattttttttgactccgttgaacgtcctagcgg

SEQ ID NO: 954 - DNA, 102 bp, synthetic construct
  source 1..102: mol_type = other DNA
gtagcatcactaactgttttagagctaccgctaggacgttcaacggagtcttttttttcagccaactccaattttttttgactccgttgaacgtcctagcgg

SEQ ID NO: 955 - DNA, 101 bp, synthetic construct
  source 1..101: mol_type = other DNA
gcggagtctctaacgttttagagctaccgctaggacgttcaacggagtcttttttttcagccaactccaattttttttgactccgttgaacgtcctagcgg

SEQ ID NO: 956 - DNA, 101 bp, synthetic construct
  source 1..101: mol_type = other DNA
gacgagcaaggcgtgttttagagctaccgctaggacgttcaacggagtcttttttttcagccaactccaattttttttgactccgttgaacgtcctagcgg

SEQ ID NO: 957 - DNA, 102 bp, synthetic construct
  source 1..102: mol_type = other DNA
gcgtgcgcaggcgtcgttttagagctaccatagcggtactatcggcatctttttttttcagccaactccaattttttttagatgccgatagtaccgctatgg

SEQ ID NO: 958 - DNA, 102 bp, synthetic construct
  source 1..102: mol_type = other DNA
gtagcatcactaactgttttagagctaccatagcggtactatcggcatctttttttttcagccaactccaattttttttagatgccgatagtaccgctatgg

SEQ ID NO: 959 - DNA, 101 bp, synthetic construct
  source 1..101: mol_type = other DNA
gcggagtctctaacgttttagagctaccatagcggtactatcggcatctttttttttcagccaactccaattttttttagatgccgatagtaccgctatgg

SEQ ID NO: 960 - DNA, 101 bp, synthetic construct
  source 1..101: mol_type = other DNA
gacgagcaaggcgtgttttagagctaccatagcggtactatcggcatctttttttttcagccaactccaattttttttagatgccgatagtaccgctatgg

SEQ ID NO: 961 - DNA, 102 bp, synthetic construct
  source 1..102: mol_type = other DNA
gcgtgcgcaggcgtcgttttagagctacctcgtactagtctcgcatgaccttttttttcagccaactccaattttttttggtcatgcgagactagtacgagg

SEQ ID NO: 962 - DNA, 102 bp, synthetic construct
  source 1..102: mol_type = other DNA
gtagcatcactaactgttttagagctacctcgtactagtctcgcatgaccttttttttcagccaactccaattttttttggtcatgcgagactagtacgagg

SEQ ID NO: 963 - DNA, 101 bp, synthetic construct
  source 1..101: mol_type = other DNA
gcggagtctctaacgttttagagctacctcgtactagtctcgcatgaccttttttttcagccaactccaattttttttggtcatgcgagactagtacgagg

SEQ ID NO: 964 - DNA, 101 bp, synthetic construct
  source 1..101: mol_type = other DNA
gacgagcaaggcgtgttttagagctacctcgtactagtctcgcatgaccttttttttcagccaactccaattttttttggtcatgcgagactagtacgagg

SEQ ID NO: 965 - DNA, 102 bp, synthetic construct
  source 1..102: mol_type = other DNA
gcgtgcgcaggcgtcgttttagagctaccgatagtgctaaacgacgctttttttttttcagccaactccaattttttttaaagcgtcgtttagcactatcgg

SEQ ID NO: 966 - DNA, 102 bp, synthetic construct
  source 1..102: mol_type = other DNA
gtagcatcactaactgttttagagctaccgatagtgctaaacgacgctttttttttttcagccaactccaattttttttaaagcgtcgtttagcactatcgg

SEQ ID NO: 967 - DNA, 101 bp, synthetic construct
  source 1..101: mol_type = other DNA
gcggagtctctaacgttttagagctaccgatagtgctaaacgacgctttttttttttcagccaactccaattttttttaaagcgtcgtttagcactatcgg

SEQ ID NO: 968 - DNA, 101 bp, synthetic construct
  source 1..101: mol_type = other DNA
gacgagcaaggcgtgttttagagctaccgatagtgctaaacgacgctttttttttttcagccaactccaattttttttaaagcgtcgtttagcactatcgg

SEQ ID NO: 969 - DNA, 102 bp, synthetic construct
  source 1..102: mol_type = other DNA
gcgtgcgcaggcgtcgttttagagctacccgttatcgacgttcaaggaacttttttttcagccaactccaattttttttgttccttgaacgtcgataacggg

SEQ ID NO: 970 - DNA, 102 bp, synthetic construct
  source 1..102: mol_type = other DNA
gtagcatcactaactgttttagagctacccgttatcgacgttcaaggaacttttttttcagccaactccaattttttttgttccttgaacgtcgataacggg

SEQ ID NO: 971 - DNA, 101 bp, synthetic construct
  source 1..101: mol_type = other DNA
gcggagtctctaacgttttagagctacccgttatcgacgttcaaggaacttttttttcagccaactccaattttttttgttccttgaacgtcgataacggg

SEQ ID NO: 972 - DNA, 101 bp, synthetic construct
  source 1..101: mol_type = other DNA
gacgagcaaggcgtgttttagagctacccgttatcgacgttcaaggaacttttttttcagccaactccaattttttttgttccttgaacgtcgataacggg

SEQ ID NO: 973 - DNA, 102 bp, synthetic construct
  source 1..102: mol_type = other DNA
gcgtgcgcaggcgtcgttttagagctaccgatcaatgcggtctgcgtaacttttttttcagccaactccaattttttttgttacgcagaccgcattgatcgg

SEQ ID NO: 974 - DNA, 102 bp, synthetic construct
  source 1..102: mol_type = other DNA
gtagcatcactaactgttttagagctaccgatcaatgcggtctgcgtaacttttttttcagccaactccaattttttttgttacgcagaccgcattgatcgg

SEQ ID NO: 975 - DNA, 101 bp, synthetic construct
  source 1..101: mol_type = other DNA
gcggagtctctaacgttttagagctaccgatcaatgcggtctgcgtaacttttttttcagccaactccaattttttttgttacgcagaccgcattgatcgg

SEQ ID NO: 976 - DNA, 101 bp, synthetic construct
  source 1..101: mol_type = other DNA
gacgagcaaggcgtgttttagagctaccgatcaatgcggtctgcgtaacttttttttcagccaactccaattttttttgttacgcagaccgcattgatcgg

SEQ ID NO: 977 - DNA, 102 bp, synthetic construct
  source 1..102: mol_type = other DNA
gcgtgcgcaggcgtcgttttagagctacccttactcgcgatactctcgacttttttttcagccaactccaattttttttgtcgagagtatcgcgagtaaggg

SEQ ID NO: 978 - DNA, 102 bp, synthetic construct
  source 1..102: mol_type = other DNA
gtagcatcactaactgttttagagctacccttactcgcgatactctcgacttttttttcagccaactccaattttttttgtcgagagtatcgcgagtaaggg

SEQ ID NO: 979 - DNA, 101 bp, synthetic construct
  source 1..101: mol_type = other DNA
gcggagtctctaacgttttagagctacccttactcgcgatactctcgacttttttttcagccaactccaattttttttgtcgagagtatcgcgagtaaggg

SEQ ID NO: 980 - DNA, 101 bp, synthetic construct
  source 1..101: mol_type = other DNA
gacgagcaaggcgtgttttagagctacccttactcgcgatactctcgacttttttttcagccaactccaattttttttgtcgagagtatcgcgagtaaggg

SEQ ID NO: 981 - DNA, 102 bp, synthetic construct
  source 1..102: mol_type = other DNA
gcgtgcgcaggcgtcgttttagagctaccgcggacggtaagcacggaatattttttttcagccaactccaatttttttttattccgtgcttaccgtccgcgg

SEQ ID NO: 982 - DNA, 102 bp, synthetic construct
  source 1..102: mol_type = other DNA
gtagcatcactaactgttttagagctaccgcggacggtaagcacggaatattttttttcagccaactccaatttttttttattccgtgcttaccgtccgcgg

SEQ ID NO: 983 - DNA, 101 bp, synthetic construct
  source 1..101: mol_type = other DNA
gcggagtctctaacgttttagagctaccgcggacggtaagcacggaatattttttttcagccaactccaatttttttttattccgtgcttaccgtccgcgg

SEQ ID NO: 984 - DNA, 101 bp, synthetic construct
  source 1..101: mol_type = other DNA
gacgagcaaggcgtgttttagagctaccgcggacggtaagcacggaatattttttttcagccaactccaatttttttttattccgtgcttaccgtccgcgg

SEQ ID NO: 985 - DNA, 102 bp, synthetic construct
  source 1..102: mol_type = other DNA
gcgtgcgcaggcgtcgttttagagctacctatagtcacgaatcgtagggtttttttttcagccaactccaattttttttaccctacgattcgtgactatagg

SEQ ID NO: 986 - DNA, 102 bp, synthetic construct
  source 1..102: mol_type = other DNA
gtagcatcactaactgttttagagctacctatagtcacgaatcgtagggtttttttttcagccaactccaattttttttaccctacgattcgtgactatagg

SEQ ID NO: 987 - DNA, 101 bp, synthetic construct
  source 1..101: mol_type = other DNA
gcggagtctctaacgttttagagctacctatagtcacgaatcgtagggtttttttttcagccaactccaattttttttaccctacgattcgtgactatagg

SEQ ID NO: 988 - DNA, 101 bp, synthetic construct
  source 1..101: mol_type = other DNA
gacgagcaaggcgtgttttagagctacctatagtcacgaatcgtagggtttttttttcagccaactccaattttttttaccctacgattcgtgactatagg

SEQ ID NO: 989 - DNA, 102 bp, synthetic construct
  source 1..102: mol_type = other DNA
gcgtgcgcaggcgtcgttttagagctacccgtcgtcacgtatgcgtagcattttttttcagccaactccaatttttttttgctacgcatacgtgacgacggg

SEQ ID NO: 990 - DNA, 102 bp, synthetic construct
  source 1..102: mol_type = other DNA
gtagcatcactaactgttttagagctacccgtcgtcacgtatgcgtagcattttttttcagccaactccaatttttttttgctacgcatacgtgacgacggg

SEQ ID NO: 991 - DNA, 101 bp, synthetic construct
  source 1..101: mol_type = other DNA
gcggagtctctaacgttttagagctacccgtcgtcacgtatgcgtagcattttttttcagccaactccaatttttttttgctacgcatacgtgacgacggg

SEQ ID NO: 992 - DNA, 101 bp, synthetic construct
  source 1..101: mol_type = other DNA
gacgagcaaggcgtgttttagagctacccgtcgtcacgtatgcgtagcattttttttcagccaactccaatttttttttgctacgcatacgtgacgacggg

SEQ ID NO: 993 - DNA, 102 bp, synthetic construct
  source 1..102: mol_type = other DNA
gcgtgcgcaggcgtcgttttagagctacccgagaggtagtagacgacgcattttttttcagccaactccaatttttttttgcgtcgtctactacctctcggg

SEQ ID NO: 994 - DNA, 102 bp, synthetic construct
  source 1..102: mol_type = other DNA
gtagcatcactaactgttttagagctacccgagaggtagtagacgacgcattttttttcagccaactccaatttttttttgcgtcgtctactacctctcggg

SEQ ID NO: 995 - DNA, 101 bp, synthetic construct
  source 1..101: mol_type = other DNA
gcggagtctctaacgttttagagctacccgagaggtagtagacgacgcattttttttcagccaactccaatttttttttgcgtcgtctactacctctcggg

SEQ ID NO: 996 - DNA, 101 bp, synthetic construct
  source 1..101: mol_type = other DNA
gacgagcaaggcgtgttttagagctacccgagaggtagtagacgacgcattttttttcagccaactccaatttttttttgcgtcgtctactacctctcggg

SEQ ID NO: 997 - DNA, 102 bp, synthetic construct
  source 1..102: mol_type = other DNA
gcgtgcgcaggcgtcgttttagagctaccgacgtctacggacgggagctattttttttcagccaactccaatttttttttagctcccgtccgtagacgtcgg

SEQ ID NO: 998 - DNA, 102 bp, synthetic construct
  source 1..102: mol_type = other DNA
gtagcatcactaactgttttagagctaccgacgtctacggacgggagctattttttttcagccaactccaatttttttttagctcccgtccgtagacgtcgg

SEQ ID NO: 999 - DNA, 101 bp, synthetic construct
  source 1..101: mol_type = other DNA
gcggagtctctaacgttttagagctaccgacgtctacggacgggagctattttttttcagccaactccaatttttttttagctcccgtccgtagacgtcgg

SEQ ID NO: 1000 - DNA, 101 bp, synthetic construct
  source 1..101: mol_type = other DNA
gacgagcaaggcgtgttttagagctaccgacgtctacggacgggagctattttttttcagccaactccaatttttttttagctcccgtccgtagacgtcgg

SEQ ID NO: 1001 - DNA, 102 bp, synthetic construct
  source 1..102: mol_type = other DNA
gcgtgcgcaggcgtcgttttagagctaccaaagctcattcgcgactgagcttttttttcagccaactccaattttttttgctcagtcgcgaatgagctttgg

SEQ ID NO: 1002 - DNA, 102 bp, synthetic construct
  source 1..102: mol_type = other DNA
gtagcatcactaactgttttagagctaccaaagctcattcgcgactgagcttttttttcagccaactccaattttttttgctcagtcgcgaatgagctttgg

SEQ ID NO: 1003 - DNA, 101 bp, synthetic construct
  source 1..101: mol_type = other DNA
gcggagtctctaacgttttagagctaccaaagctcattcgcgactgagcttttttttcagccaactccaattttttttgctcagtcgcgaatgagctttgg

SEQ ID NO: 1004 - DNA, 101 bp, synthetic construct
  source 1..101: mol_type = other DNA
gacgagcaaggcgtgttttagagctaccaaagctcattcgcgactgagcttttttttcagccaactccaattttttttgctcagtcgcgaatgagctttgg

SEQ ID NO: 1005 - DNA, 102 bp, synthetic construct
  source 1..102: mol_type = other DNA
gcgtgcgcaggcgtcgttttagagctaccatggcacgatcgacacggaggttttttttcagccaactccaattttttttcctccgtgtcgatcgtgccatgg

SEQ ID NO: 1006 - DNA, 102 bp, synthetic construct
  source 1..102: mol_type = other DNA
gtagcatcactaactgttttagagctaccatggcacgatcgacacggaggttttttttcagccaactccaattttttttcctccgtgtcgatcgtgccatgg

SEQ ID NO: 1007 - DNA, 101 bp, synthetic construct
  source 1..101: mol_type = other DNA
gcggagtctctaacgttttagagctaccatggcacgatcgacacggaggttttttttcagccaactccaattttttttcctccgtgtcgatcgtgccatgg

SEQ ID NO: 1008 - DNA, 101 bp, synthetic construct
  source 1..101: mol_type = other DNA
gacgagcaaggcgtgttttagagctaccatggcacgatcgacacggaggttttttttcagccaactccaattttttttcctccgtgtcgatcgtgccatgg

SEQ ID NO: 1009 - DNA, 102 bp, synthetic construct
  source 1..102: mol_type = other DNA
gcgtgcgcaggcgtcgttttagagctacccgaactctctatcgaacgagtttttttttcagccaactccaattttttttactcgttcgatagagagttcggg

SEQ ID NO: 1010 - DNA, 102 bp, synthetic construct
  source 1..102: mol_type = other DNA
gtagcatcactaactgttttagagctacccgaactctctatcgaacgagtttttttttcagccaactccaattttttttactcgttcgatagagagttcggg

SEQ ID NO: 1011 - DNA, 101 bp, synthetic construct
  source 1..101: mol_type = other DNA
gcggagtctctaacgttttagagctacccgaactctctatcgaacgagtttttttttcagccaactccaattttttttactcgttcgatagagagttcggg

SEQ ID NO: 1012 - DNA, 101 bp, synthetic construct
  source 1..101: mol_type = other DNA
gacgagcaaggcgtgttttagagctacccgaactctctatcgaacgagtttttttttcagccaactccaattttttttactcgttcgatagagagttcggg

SEQ ID NO: 1013 - DNA, 104 bp, synthetic construct
  source 1..104: mol_type = other DNA
gctcgagggcgggctgttttagagctaccgtcgttgtaccgtctacttgacttttttttcagccaactccaattttttttgtcaagtagacggtacaacgacgg

SEQ ID NO: 1014 - DNA, 103 bp, synthetic construct
  source 1..103: mol_type = other DNA
gccaatcagcgccggttttagagctaccgtcgttgtaccgtctacttgacttttttttcagccaactccaattttttttgtcaagtagacggtacaacgacgg

SEQ ID NO: 1015 - DNA, 104 bp, synthetic construct
  source 1..104: mol_type = other DNA
gtggattccggacaagttttagagctaccgtcgttgtaccgtctacttgacttttttttcagccaactccaattttttttgtcaagtagacggtacaacgacgg

SEQ ID NO: 1016 - DNA, 103 bp, synthetic construct
  source 1..103: mol_type = other DNA
gtgtggctctggtcgttttagagctaccgtcgttgtaccgtctacttgacttttttttcagccaactccaattttttttgtcaagtagacggtacaacgacgg

SEQ ID NO: 1017 - DNA, 102 bp, synthetic construct
  source 1..102: mol_type = other DNA
gctcgagggcgggctgttttagagctacctacactcgacatcggtagctattttttttcagccaactccaatttttttttagctaccgatgtcgagtgtagg

SEQ ID NO: 1018 - DNA, 101 bp, synthetic construct
  source 1..101: mol_type = other DNA
gccaatcagcgccggttttagagctacctacactcgacatcggtagctattttttttcagccaactccaatttttttttagctaccgatgtcgagtgtagg

SEQ ID NO: 1019 - DNA, 102 bp, synthetic construct
  source 1..102: mol_type = other DNA
gtggattccggacaagttttagagctacctacactcgacatcggtagctattttttttcagccaactccaatttttttttagctaccgatgtcgagtgtagg

SEQ ID NO: 1020 - DNA, 101 bp, synthetic construct
  source 1..101: mol_type = other DNA
gtgtggctctggtcgttttagagctacctacactcgacatcggtagctattttttttcagccaactccaatttttttttagctaccgatgtcgagtgtagg

SEQ ID NO: 1021 - DNA, 102 bp, synthetic construct
  source 1..102: mol_type = other DNA
gctcgagggcgggctgttttagagctaccctggcggaacgttcgagtaatttttttttcagccaactccaattttttttattactcgaacgttccgccaggg

SEQ ID NO: 1022 - DNA, 101 bp, synthetic construct
  source 1..101: mol_type = other DNA
gccaatcagcgccggttttagagctaccctggcggaacgttcgagtaatttttttttcagccaactccaattttttttattactcgaacgttccgccaggg

SEQ ID NO: 1023 - DNA, 102 bp, synthetic construct
  source 1..102: mol_type = other DNA
gtggattccggacaagttttagagctaccctggcggaacgttcgagtaatttttttttcagccaactccaattttttttattactcgaacgttccgccaggg

SEQ ID NO: 1024 - DNA, 101 bp, synthetic construct
  source 1..101: mol_type = other DNA
gtgtggctctggtcgttttagagctaccctggcggaacgttcgagtaatttttttttcagccaactccaattttttttattactcgaacgttccgccaggg

SEQ ID NO: 1025 - DNA, 102 bp, synthetic construct
  source 1..102: mol_type = other DNA
gctcgagggcgggctgttttagagctacctacacgatagtggtcgtgcgcttttttttcagccaactccaattttttttgcgcacgaccactatcgtgtagg

SEQ ID NO: 1026 - DNA, 101 bp, synthetic construct
  source 1..101: mol_type = other DNA
gccaatcagcgccggttttagagctacctacacgatagtggtcgtgcgcttttttttcagccaactccaattttttttgcgcacgaccactatcgtgtagg

SEQ ID NO: 1027 - DNA, 102 bp, synthetic construct
  source 1..102: mol_type = other DNA
gtggattccggacaagttttagagctacctacacgatagtggtcgtgcgcttttttttcagccaactccaattttttttgcgcacgaccactatcgtgtagg

SEQ ID NO: 1028 - DNA, 101 bp, synthetic construct
  source 1..101: mol_type = other DNA
gtgtggctctggtcgttttagagctacctacacgatagtggtcgtgcgcttttttttcagccaactccaattttttttgcgcacgaccactatcgtgtagg

SEQ ID NO: 1029 - DNA, 104 bp, synthetic construct
  source 1..104: mol_type = other DNA
gctcgagggcgggctgttttagagctaccttcccgacttccgtaggagcgcttttttttcagccaactccaattttttttgcgctcctacggaagtcgggaagg

SEQ ID NO: 1030 - DNA, 103 bp, synthetic construct
  source 1..103: mol_type = other DNA
gccaatcagcgccggttttagagctaccttcccgacttccgtaggagcgcttttttttcagccaactccaattttttttgcgctcctacggaagtcgggaagg

SEQ ID NO: 1031 - DNA, 104 bp, synthetic construct
  source 1..104: mol_type = other DNA
gtggattccggacaagttttagagctaccttcccgacttccgtaggagcgcttttttttcagccaactccaattttttttgcgctcctacggaagtcgggaagg

SEQ ID NO: 1032 - DNA, 103 bp, synthetic construct
  source 1..103: mol_type = other DNA
gtgtggctctggtcgttttagagctaccttcccgacttccgtaggagcgcttttttttcagccaactccaattttttttgcgctcctacggaagtcgggaagg

SEQ ID NO: 1033 - DNA, 104 bp, synthetic construct
  source 1..104: mol_type = other DNA
gctcgagggcgggctgttttagagctacctgaaggtaaagatcgggtcctcttttttttcagccaactccaattttttttgaggacccgatctttaccttcagg

SEQ ID NO: 1034 - DNA, 103 bp, synthetic construct
  source 1..103: mol_type = other DNA
gccaatcagcgccggttttagagctacctgaaggtaaagatcgggtcctcttttttttcagccaactccaattttttttgaggacccgatctttaccttcagg

SEQ ID NO: 1035 - DNA, 104 bp, synthetic construct
  source 1..104: mol_type = other DNA
gtggattccggacaagttttagagctacctgaaggtaaagatcgggtcctcttttttttcagccaactccaattttttttgaggacccgatctttaccttcagg

SEQ ID NO: 1036 - DNA, 103 bp, synthetic construct
  source 1..103: mol_type = other DNA
gtgtggctctggtcgttttagagctacctgaaggtaaagatcgggtcctcttttttttcagccaactccaattttttttgaggacccgatctttaccttcagg

SEQ ID NO: 1037 - DNA, 102 bp, synthetic construct
  source 1..102: mol_type = other DNA
gctcgagggcgggctgttttagagctacctggttatagcggacgcactgtttttttttcagccaactccaattttttttacagtgcgtccgctataaccagg

SEQ ID NO: 1038 - DNA, 101 bp, synthetic construct
  source 1..101: mol_type = other DNA
gccaatcagcgccggttttagagctacctggttatagcggacgcactgtttttttttcagccaactccaattttttttacagtgcgtccgctataaccagg

SEQ ID NO: 1039 - DNA, 102 bp, synthetic construct
  source 1..102: mol_type = other DNA
gtggattccggacaagttttagagctacctggttatagcggacgcactgtttttttttcagccaactccaattttttttacagtgcgtccgctataaccagg

SEQ ID NO: 1040 - DNA, 101 bp, synthetic construct
  source 1..101: mol_type = other DNA
gtgtggctctggtcgttttagagctacctggttatagcggacgcactgtttttttttcagccaactccaattttttttacagtgcgtccgctataaccagg

SEQ ID NO: 1041 - DNA, 102 bp, synthetic construct
  source 1..102: mol_type = other DNA
gctcgagggcgggctgttttagagctaccgcatcgtattatctgcgaagcttttttttcagccaactccaattttttttgcttcgcagataatacgatgcgg

SEQ ID NO: 1042 - DNA, 101 bp, synthetic construct
  source 1..101: mol_type = other DNA
gccaatcagcgccggttttagagctaccgcatcgtattatctgcgaagcttttttttcagccaactccaattttttttgcttcgcagataatacgatgcgg

SEQ ID NO: 1043 - DNA, 102 bp, synthetic construct
  source 1..102: mol_type = other DNA
gtggattccggacaagttttagagctaccgcatcgtattatctgcgaagcttttttttcagccaactccaattttttttgcttcgcagataatacgatgcgg

SEQ ID NO: 1044 - DNA, 101 bp, synthetic construct
  source 1..101: mol_type = other DNA
gtgtggctctggtcgttttagagctaccgcatcgtattatctgcgaagcttttttttcagccaactccaattttttttgcttcgcagataatacgatgcgg

SEQ ID NO: 1045 - DNA, 102 bp, synthetic construct
  source 1..102: mol_type = other DNA
gctcgagggcgggctgttttagagctaccgctaggacgttcaacggagtcttttttttcagccaactccaattttttttgactccgttgaacgtcctagcgg

SEQ ID NO: 1046 - DNA, 101 bp, synthetic construct
  source 1..101: mol_type = other DNA
gccaatcagcgccggttttagagctaccgctaggacgttcaacggagtcttttttttcagccaactccaattttttttgactccgttgaacgtcctagcgg

SEQ ID NO: 1047 - DNA, 102 bp, synthetic construct
  source 1..102: mol_type = other DNA
gtggattccggacaagttttagagctaccgctaggacgttcaacggagtcttttttttcagccaactccaattttttttgactccgttgaacgtcctagcgg

SEQ ID NO: 1048 - DNA, 101 bp, synthetic construct
  source 1..101: mol_type = other DNA
gtgtggctctggtcgttttagagctaccgctaggacgttcaacggagtcttttttttcagccaactccaattttttttgactccgttgaacgtcctagcgg

SEQ ID NO: 1049 - DNA, 102 bp, synthetic construct
  source 1..102: mol_type = other DNA
gctcgagggcgggctgttttagagctaccatagcggtactatcggcatctttttttttcagccaactccaattttttttagatgccgatagtaccgctatgg

SEQ ID NO: 1050 - DNA, 101 bp, synthetic construct
  source 1..101: mol_type = other DNA
gccaatcagcgccggttttagagctaccatagcggtactatcggcatctttttttttcagccaactccaattttttttagatgccgatagtaccgctatgg

SEQ ID NO: 1051 - DNA, 102 bp, synthetic construct
  source 1..102: mol_type = other DNA
gtggattccggacaagttttagagctaccatagcggtactatcggcatctttttttttcagccaactccaattttttttagatgccgatagtaccgctatgg

SEQ ID NO: 1052 - DNA, 101 bp, synthetic construct
  source 1..101: mol_type = other DNA
gtgtggctctggtcgttttagagctaccatagcggtactatcggcatctttttttttcagccaactccaattttttttagatgccgatagtaccgctatgg

SEQ ID NO: 1053 - DNA, 102 bp, synthetic construct
  source 1..102: mol_type = other DNA
gctcgagggcgggctgttttagagctacctcgtactagtctcgcatgaccttttttttcagccaactccaattttttttggtcatgcgagactagtacgagg

SEQ ID NO: 1054 - DNA, 101 bp, synthetic construct
  source 1..101: mol_type = other DNA
gccaatcagcgccggttttagagctacctcgtactagtctcgcatgaccttttttttcagccaactccaattttttttggtcatgcgagactagtacgagg

SEQ ID NO: 1055 - DNA, 102 bp, synthetic construct
  source 1..102: mol_type = other DNA
gtggattccggacaagttttagagctacctcgtactagtctcgcatgaccttttttttcagccaactccaattttttttggtcatgcgagactagtacgagg

SEQ ID NO: 1056 - DNA, 101 bp, synthetic construct
  source 1..101: mol_type = other DNA
gtgtggctctggtcgttttagagctacctcgtactagtctcgcatgaccttttttttcagccaactccaattttttttggtcatgcgagactagtacgagg

SEQ ID NO: 1057 - DNA, 102 bp, synthetic construct
  source 1..102: mol_type = other DNA
gctcgagggcgggctgttttagagctaccgatagtgctaaacgacgctttttttttttcagccaactccaattttttttaaagcgtcgtttagcactatcgg

SEQ ID NO: 1058 - DNA, 101 bp, synthetic construct
  source 1..101: mol_type = other DNA
gccaatcagcgccggttttagagctaccgatagtgctaaacgacgctttttttttttcagccaactccaattttttttaaagcgtcgtttagcactatcgg

SEQ ID NO: 1059 - DNA, 102 bp, synthetic construct
  source 1..102: mol_type = other DNA
gtggattccggacaagttttagagctaccgatagtgctaaacgacgctttttttttttcagccaactccaattttttttaaagcgtcgtttagcactatcgg

SEQ ID NO: 1060 - DNA, 101 bp, synthetic construct
  source 1..101: mol_type = other DNA
gtgtggctctggtcgttttagagctaccgatagtgctaaacgacgctttttttttttcagccaactccaattttttttaaagcgtcgtttagcactatcgg

SEQ ID NO: 1061 - DNA, 102 bp, synthetic construct
  source 1..102: mol_type = other DNA
gctcgagggcgggctgttttagagctacccgttatcgacgttcaaggaacttttttttcagccaactccaattttttttgttccttgaacgtcgataacggg

SEQ ID NO: 1062 - DNA, 101 bp, synthetic construct
  source 1..101: mol_type = other DNA
gccaatcagcgccggttttagagctacccgttatcgacgttcaaggaacttttttttcagccaactccaattttttttgttccttgaacgtcgataacggg

SEQ ID NO: 1063 - DNA, 102 bp, synthetic construct
  source 1..102: mol_type = other DNA
gtggattccggacaagttttagagctacccgttatcgacgttcaaggaacttttttttcagccaactccaattttttttgttccttgaacgtcgataacggg

SEQ ID NO: 1064 - DNA, 101 bp, synthetic construct
  source 1..101: mol_type = other DNA
gtgtggctctggtcgttttagagctacccgttatcgacgttcaaggaacttttttttcagccaactccaattttttttgttccttgaacgtcgataacggg

SEQ ID NO: 1065 - DNA, 102 bp, synthetic construct
  source 1..102: mol_type = other DNA
gctcgagggcgggctgttttagagctaccgatcaatgcggtctgcgtaacttttttttcagccaactccaattttttttgttacgcagaccgcattgatcgg

SEQ ID NO: 1066 - DNA, 101 bp, synthetic construct
  source 1..101: mol_type = other DNA
gccaatcagcgccggttttagagctaccgatcaatgcggtctgcgtaacttttttttcagccaactccaattttttttgttacgcagaccgcattgatcgg

SEQ ID NO: 1067 - DNA, 102 bp, synthetic construct
  source 1..102: mol_type = other DNA
gtggattccggacaagttttagagctaccgatcaatgcggtctgcgtaacttttttttcagccaactccaattttttttgttacgcagaccgcattgatcgg

SEQ ID NO: 1068 - DNA, 101 bp, synthetic construct
  source 1..101: mol_type = other DNA
gtgtggctctggtcgttttagagctaccgatcaatgcggtctgcgtaacttttttttcagccaactccaattttttttgttacgcagaccgcattgatcgg

SEQ ID NO: 1069 - DNA, 102 bp, synthetic construct
  source 1..102: mol_type = other DNA
gctcgagggcgggctgttttagagctacccttactcgcgatactctcgacttttttttcagccaactccaattttttttgtcgagagtatcgcgagtaaggg

SEQ ID NO: 1070 - DNA, 101 bp, synthetic construct
  source 1..101: mol_type = other DNA
gccaatcagcgccggttttagagctacccttactcgcgatactctcgacttttttttcagccaactccaattttttttgtcgagagtatcgcgagtaaggg

SEQ ID NO: 1071 - DNA, 102 bp, synthetic construct
  source 1..102: mol_type = other DNA
gtggattccggacaagttttagagctacccttactcgcgatactctcgacttttttttcagccaactccaattttttttgtcgagagtatcgcgagtaaggg

SEQ ID NO: 1072 - DNA, 101 bp, synthetic construct
  source 1..101: mol_type = other DNA
gtgtggctctggtcgttttagagctacccttactcgcgatactctcgacttttttttcagccaactccaattttttttgtcgagagtatcgcgagtaaggg

SEQ ID NO: 1073 - DNA, 102 bp, synthetic construct
  source 1..102: mol_type = other DNA
gctcgagggcgggctgttttagagctaccgcggacggtaagcacggaatattttttttcagccaactccaatttttttttattccgtgcttaccgtccgcgg

SEQ ID NO: 1074 - DNA, 101 bp, synthetic construct
  source 1..101: mol_type = other DNA
gccaatcagcgccggttttagagctaccgcggacggtaagcacggaatattttttttcagccaactccaatttttttttattccgtgcttaccgtccgcgg

SEQ ID NO: 1075 - DNA, 102 bp, synthetic construct
  source 1..102: mol_type = other DNA
gtggattccggacaagttttagagctaccgcggacggtaagcacggaatattttttttcagccaactccaatttttttttattccgtgcttaccgtccgcgg

SEQ ID NO: 1076 - DNA, 101 bp, synthetic construct
  source 1..101: mol_type = other DNA
gtgtggctctggtcgttttagagctaccgcggacggtaagcacggaatattttttttcagccaactccaatttttttttattccgtgcttaccgtccgcgg

SEQ ID NO: 1077 - DNA, 102 bp, synthetic construct
  source 1..102: mol_type = other DNA
gctcgagggcgggctgttttagagctacctatagtcacgaatcgtagggtttttttttcagccaactccaattttttttaccctacgattcgtgactatagg

SEQ ID NO: 1078 - DNA, 101 bp, synthetic construct
  source 1..101: mol_type = other DNA
gccaatcagcgccggttttagagctacctatagtcacgaatcgtagggtttttttttcagccaactccaattttttttaccctacgattcgtgactatagg

SEQ ID NO: 1079 - DNA, 102 bp, synthetic construct
  source 1..102: mol_type = other DNA
gtggattccggacaagttttagagctacctatagtcacgaatcgtagggtttttttttcagccaactccaattttttttaccctacgattcgtgactatagg

SEQ ID NO: 1080 - DNA, 101 bp, synthetic construct
  source 1..101: mol_type = other DNA
gtgtggctctggtcgttttagagctacctatagtcacgaatcgtagggtttttttttcagccaactccaattttttttaccctacgattcgtgactatagg

SEQ ID NO: 1081 - DNA, 102 bp, synthetic construct
  source 1..102: mol_type = other DNA
gctcgagggcgggctgttttagagctacccgtcgtcacgtatgcgtagcattttttttcagccaactccaatttttttttgctacgcatacgtgacgacggg

SEQ ID NO: 1082 - DNA, 101 bp, synthetic construct
  source 1..101: mol_type = other DNA
gccaatcagcgccggttttagagctacccgtcgtcacgtatgcgtagcattttttttcagccaactccaatttttttttgctacgcatacgtgacgacggg

SEQ ID NO: 1083 - DNA, 102 bp, synthetic construct
  source 1..102: mol_type = other DNA
gtggattccggacaagttttagagctacccgtcgtcacgtatgcgtagcattttttttcagccaactccaatttttttttgctacgcatacgtgacgacggg

SEQ ID NO: 1084 - DNA, 101 bp, synthetic construct
  source 1..101: mol_type = other DNA
gtgtggctctggtcgttttagagctacccgtcgtcacgtatgcgtagcattttttttcagccaactccaatttttttttgctacgcatacgtgacgacggg

SEQ ID NO: 1085 - DNA, 102 bp, synthetic construct
  source 1..102: mol_type = other DNA
gctcgagggcgggctgttttagagctacccgagaggtagtagacgacgcattttttttcagccaactccaatttttttttgcgtcgtctactacctctcggg

SEQ ID NO: 1086 - DNA, 101 bp, synthetic construct
  source 1..101: mol_type = other DNA
gccaatcagcgccggttttagagctacccgagaggtagtagacgacgcattttttttcagccaactccaatttttttttgcgtcgtctactacctctcggg

SEQ ID NO: 1087 - DNA, 102 bp, synthetic construct
  source 1..102: mol_type = other DNA
gtggattccggacaagttttagagctacccgagaggtagtagacgacgcattttttttcagccaactccaatttttttttgcgtcgtctactacctctcggg

SEQ ID NO: 1088 - DNA, 101 bp, synthetic construct
  source 1..101: mol_type = other DNA
gtgtggctctggtcgttttagagctacccgagaggtagtagacgacgcattttttttcagccaactccaatttttttttgcgtcgtctactacctctcggg

SEQ ID NO: 1089 - DNA, 102 bp, synthetic construct
  source 1..102: mol_type = other DNA
gctcgagggcgggctgttttagagctaccgacgtctacggacgggagctattttttttcagccaactccaatttttttttagctcccgtccgtagacgtcgg

SEQ ID NO: 1090 - DNA, 101 bp, synthetic construct
  source 1..101: mol_type = other DNA
gccaatcagcgccggttttagagctaccgacgtctacggacgggagctattttttttcagccaactccaatttttttttagctcccgtccgtagacgtcgg

SEQ ID NO: 1091 - DNA, 102 bp, synthetic construct
  source 1..102: mol_type = other DNA
gtggattccggacaagttttagagctaccgacgtctacggacgggagctattttttttcagccaactccaatttttttttagctcccgtccgtagacgtcgg

SEQ ID NO: 1092 - DNA, 101 bp, synthetic construct
  source 1..101: mol_type = other DNA
gtgtggctctggtcgttttagagctaccgacgtctacggacgggagctattttttttcagccaactccaatttttttttagctcccgtccgtagacgtcgg

SEQ ID NO: 1093 - DNA, 102 bp, synthetic construct
  source 1..102: mol_type = other DNA
gctcgagggcgggctgttttagagctaccaaagctcattcgcgactgagcttttttttcagccaactccaattttttttgctcagtcgcgaatgagctttgg

SEQ ID NO: 1094 - DNA, 101 bp, synthetic construct
  source 1..101: mol_type = other DNA
gccaatcagcgccggttttagagctaccaaagctcattcgcgactgagcttttttttcagccaactccaattttttttgctcagtcgcgaatgagctttgg

SEQ ID NO: 1095 - DNA, 102 bp, synthetic construct
  source 1..102: mol_type = other DNA
gtggattccggacaagttttagagctaccaaagctcattcgcgactgagcttttttttcagccaactccaattttttttgctcagtcgcgaatgagctttgg

SEQ ID NO: 1096 - DNA, 101 bp, synthetic construct
  source 1..101: mol_type = other DNA
gtgtggctctggtcgttttagagctaccaaagctcattcgcgactgagcttttttttcagccaactccaattttttttgctcagtcgcgaatgagctttgg

SEQ ID NO: 1097 - DNA, 102 bp, synthetic construct
  source 1..102: mol_type = other DNA
gctcgagggcgggctgttttagagctaccatggcacgatcgacacggaggttttttttcagccaactccaattttttttcctccgtgtcgatcgtgccatgg

SEQ ID NO: 1098 - DNA, 101 bp, synthetic construct
  source 1..101: mol_type = other DNA
gccaatcagcgccggttttagagctaccatggcacgatcgacacggaggttttttttcagccaactccaattttttttcctccgtgtcgatcgtgccatgg

SEQ ID NO: 1099 - DNA, 102 bp, synthetic construct
  source 1..102: mol_type = other DNA
gtggattccggacaagttttagagctaccatggcacgatcgacacggaggttttttttcagccaactccaattttttttcctccgtgtcgatcgtgccatgg

SEQ ID NO: 1100 - DNA, 101 bp, synthetic construct
  source 1..101: mol_type = other DNA
gtgtggctctggtcgttttagagctaccatggcacgatcgacacggaggttttttttcagccaactccaattttttttcctccgtgtcgatcgtgccatgg

SEQ ID NO: 1101 - DNA, 102 bp, synthetic construct
  source 1..102: mol_type = other DNA
gctcgagggcgggctgttttagagctacccgaactctctatcgaacgagtttttttttcagccaactccaattttttttactcgttcgatagagagttcggg

SEQ ID NO: 1102 - DNA, 101 bp, synthetic construct
  source 1..101: mol_type = other DNA
gccaatcagcgccggttttagagctacccgaactctctatcgaacgagtttttttttcagccaactccaattttttttactcgttcgatagagagttcggg

SEQ ID NO: 1103 - DNA, 102 bp, synthetic construct
  source 1..102: mol_type = other DNA
gtggattccggacaagttttagagctacccgaactctctatcgaacgagtttttttttcagccaactccaattttttttactcgttcgatagagagttcggg

SEQ ID NO: 1104 - DNA, 101 bp, synthetic construct
  source 1..101: mol_type = other DNA
gtgtggctctggtcgttttagagctacccgaactctctatcgaacgagtttttttttcagccaactccaattttttttactcgttcgatagagagttcggg

SEQ ID NO: 1105 - DNA, 103 bp, synthetic construct
  source 1..103: mol_type = other DNA
gatcgctcgggcaagttttagagctaccgtcgttgtaccgtctacttgacttttttttcagccaactccaattttttttgtcaagtagacggtacaacgacgg

SEQ ID NO: 1106 - DNA, 103 bp, synthetic construct
  source 1..103: mol_type = other DNA
gacccgcccacacggttttagagctaccgtcgttgtaccgtctacttgacttttttttcagccaactccaattttttttgtcaagtagacggtacaacgacgg

SEQ ID NO: 1107 - DNA, 104 bp, synthetic construct
  source 1..104: mol_type = other DNA
gaacctggggaggcggttttagagctaccgtcgttgtaccgtctacttgacttttttttcagccaactccaattttttttgtcaagtagacggtacaacgacgg

SEQ ID NO: 1108 - DNA, 103 bp, synthetic construct
  source 1..103: mol_type = other DNA
gttggctgggagcggttttagagctaccgtcgttgtaccgtctacttgacttttttttcagccaactccaattttttttgtcaagtagacggtacaacgacgg

SEQ ID NO: 1109 - DNA, 101 bp, synthetic construct
  source 1..101: mol_type = other DNA
gatcgctcgggcaagttttagagctacctacactcgacatcggtagctattttttttcagccaactccaatttttttttagctaccgatgtcgagtgtagg

SEQ ID NO: 1110 - DNA, 101 bp, synthetic construct
  source 1..101: mol_type = other DNA
gacccgcccacacggttttagagctacctacactcgacatcggtagctattttttttcagccaactccaatttttttttagctaccgatgtcgagtgtagg

SEQ ID NO: 1111 - DNA, 102 bp, synthetic construct
  source 1..102: mol_type = other DNA
gaacctggggaggcggttttagagctacctacactcgacatcggtagctattttttttcagccaactccaatttttttttagctaccgatgtcgagtgtagg

SEQ ID NO: 1112 - DNA, 101 bp, synthetic construct
  source 1..101: mol_type = other DNA
gttggctgggagcggttttagagctacctacactcgacatcggtagctattttttttcagccaactccaatttttttttagctaccgatgtcgagtgtagg

SEQ ID NO: 1113 - DNA, 101 bp, synthetic construct
  source 1..101: mol_type = other DNA
gatcgctcgggcaagttttagagctaccctggcggaacgttcgagtaatttttttttcagccaactccaattttttttattactcgaacgttccgccaggg

SEQ ID NO: 1114 - DNA, 101 bp, synthetic construct
  source 1..101: mol_type = other DNA
gacccgcccacacggttttagagctaccctggcggaacgttcgagtaatttttttttcagccaactccaattttttttattactcgaacgttccgccaggg

SEQ ID NO: 1115 - DNA, 102 bp, synthetic construct
  source 1..102: mol_type = other DNA
gaacctggggaggcggttttagagctaccctggcggaacgttcgagtaatttttttttcagccaactccaattttttttattactcgaacgttccgccaggg

SEQ ID NO: 1116 - DNA, 101 bp, synthetic construct
  source 1..101: mol_type = other DNA
gttggctgggagcggttttagagctaccctggcggaacgttcgagtaatttttttttcagccaactccaattttttttattactcgaacgttccgccaggg

SEQ ID NO: 1117 - DNA, 101 bp, synthetic construct
  source 1..101: mol_type = other DNA
gatcgctcgggcaagttttagagctacctacacgatagtggtcgtgcgcttttttttcagccaactccaattttttttgcgcacgaccactatcgtgtagg

SEQ ID NO: 1118 - DNA, 101 bp, synthetic construct
  source 1..101: mol_type = other DNA
gacccgcccacacggttttagagctacctacacgatagtggtcgtgcgcttttttttcagccaactccaattttttttgcgcacgaccactatcgtgtagg

SEQ ID NO: 1119 - DNA, 102 bp, synthetic construct
  source 1..102: mol_type = other DNA
gaacctggggaggcggttttagagctacctacacgatagtggtcgtgcgcttttttttcagccaactccaattttttttgcgcacgaccactatcgtgtagg

SEQ ID NO: 1120 - DNA, 101 bp, synthetic construct
  source 1..101: mol_type = other DNA
gttggctgggagcggttttagagctacctacacgatagtggtcgtgcgcttttttttcagccaactccaattttttttgcgcacgaccactatcgtgtagg

SEQ ID NO: 1121 - DNA, 103 bp, synthetic construct
  source 1..103: mol_type = other DNA
gatcgctcgggcaagttttagagctaccttcccgacttccgtaggagcgcttttttttcagccaactccaattttttttgcgctcctacggaagtcgggaagg

SEQ ID NO: 1122 - DNA, 103 bp, synthetic construct
  source 1..103: mol_type = other DNA
gacccgcccacacggttttagagctaccttcccgacttccgtaggagcgcttttttttcagccaactccaattttttttgcgctcctacggaagtcgggaagg

SEQ ID NO: 1123 - DNA, 104 bp, synthetic construct
  source 1..104: mol_type = other DNA
gaacctggggaggcggttttagagctaccttcccgacttccgtaggagcgcttttttttcagccaactccaattttttttgcgctcctacggaagtcgggaagg

SEQ ID NO: 1124 - DNA, 103 bp, synthetic construct
  source 1..103: mol_type = other DNA
gttggctgggagcggttttagagctaccttcccgacttccgtaggagcgcttttttttcagccaactccaattttttttgcgctcctacggaagtcgggaagg

SEQ ID NO: 1125 - DNA, 103 bp, synthetic construct
  source 1..103: mol_type = other DNA
gatcgctcgggcaagttttagagctacctgaaggtaaagatcgggtcctcttttttttcagccaactccaattttttttgaggacccgatctttaccttcagg

SEQ ID NO: 1126 - DNA, 103 bp, synthetic construct
  source 1..103: mol_type = other DNA
gacccgcccacacggttttagagctacctgaaggtaaagatcgggtcctcttttttttcagccaactccaattttttttgaggacccgatctttaccttcagg

SEQ ID NO: 1127 - DNA, 104 bp, synthetic construct
  source 1..104: mol_type = other DNA
gaacctggggaggcggttttagagctacctgaaggtaaagatcgggtcctcttttttttcagccaactccaattttttttgaggacccgatctttaccttcagg

SEQ ID NO: 1128 - DNA, 103 bp, synthetic construct
  source 1..103: mol_type = other DNA
gttggctgggagcggttttagagctacctgaaggtaaagatcgggtcctcttttttttcagccaactccaattttttttgaggacccgatctttaccttcagg

SEQ ID NO: 1129 - DNA, 101 bp, synthetic construct
  source 1..101: mol_type = other DNA
gatcgctcgggcaagttttagagctacctggttatagcggacgcactgtttttttttcagccaactccaattttttttacagtgcgtccgctataaccagg

SEQ ID NO: 1130 - DNA, 101 bp, synthetic construct
  source 1..101: mol_type = other DNA
gacccgcccacacggttttagagctacctggttatagcggacgcactgtttttttttcagccaactccaattttttttacagtgcgtccgctataaccagg

SEQ ID NO: 1131 - DNA, 102 bp, synthetic construct
  source 1..102: mol_type = other DNA
gaacctggggaggcggttttagagctacctggttatagcggacgcactgtttttttttcagccaactccaattttttttacagtgcgtccgctataaccagg

SEQ ID NO: 1132 - DNA, 101 bp, synthetic construct
  source 1..101: mol_type = other DNA
gttggctgggagcggttttagagctacctggttatagcggacgcactgtttttttttcagccaactccaattttttttacagtgcgtccgctataaccagg

SEQ ID NO: 1133 - DNA, 101 bp, synthetic construct
  source 1..101: mol_type = other DNA
gatcgctcgggcaagttttagagctaccgcatcgtattatctgcgaagcttttttttcagccaactccaattttttttgcttcgcagataatacgatgcgg

SEQ ID NO: 1134 - DNA, 101 bp, synthetic construct
  source 1..101: mol_type = other DNA
gacccgcccacacggttttagagctaccgcatcgtattatctgcgaagcttttttttcagccaactccaattttttttgcttcgcagataatacgatgcgg

SEQ ID NO: 1135 - DNA, 102 bp, synthetic construct
  source 1..102: mol_type = other DNA
gaacctggggaggcggttttagagctaccgcatcgtattatctgcgaagcttttttttcagccaactccaattttttttgcttcgcagataatacgatgcgg

SEQ ID NO: 1136 - DNA, 101 bp, synthetic construct
  source 1..101: mol_type = other DNA
gttggctgggagcggttttagagctaccgcatcgtattatctgcgaagcttttttttcagccaactccaattttttttgcttcgcagataatacgatgcgg

SEQ ID NO: 1137 - DNA, 101 bp, synthetic construct
  source 1..101: mol_type = other DNA
gatcgctcgggcaagttttagagctaccgctaggacgttcaacggagtcttttttttcagccaactccaattttttttgactccgttgaacgtcctagcgg

SEQ ID NO: 1138 - DNA, 101 bp, synthetic construct
  source 1..101: mol_type = other DNA
gacccgcccacacggttttagagctaccgctaggacgttcaacggagtcttttttttcagccaactccaattttttttgactccgttgaacgtcctagcgg

SEQ ID NO: 1139 - DNA, 102 bp, synthetic construct
  source 1..102: mol_type = other DNA
gaacctggggaggcggttttagagctaccgctaggacgttcaacggagtcttttttttcagccaactccaattttttttgactccgttgaacgtcctagcgg

SEQ ID NO: 1140 - DNA, 101 bp, synthetic construct
  source 1..101: mol_type = other DNA
gttggctgggagcggttttagagctaccgctaggacgttcaacggagtcttttttttcagccaactccaattttttttgactccgttgaacgtcctagcgg

SEQ ID NO: 1141 - DNA, 101 bp, synthetic construct
  source 1..101: mol_type = other DNA
gatcgctcgggcaagttttagagctaccatagcggtactatcggcatctttttttttcagccaactccaattttttttagatgccgatagtaccgctatgg

SEQ ID NO: 1142 - DNA, 101 bp, synthetic construct
  source 1..101: mol_type = other DNA
gacccgcccacacggttttagagctaccatagcggtactatcggcatctttttttttcagccaactccaattttttttagatgccgatagtaccgctatgg

SEQ ID NO: 1143 - DNA, 102 bp, synthetic construct
  source 1..102: mol_type = other DNA
gaacctggggaggcggttttagagctaccatagcggtactatcggcatctttttttttcagccaactccaattttttttagatgccgatagtaccgctatgg

SEQ ID NO: 1144 - DNA, 101 bp, synthetic construct
  source 1..101: mol_type = other DNA
gttggctgggagcggttttagagctaccatagcggtactatcggcatctttttttttcagccaactccaattttttttagatgccgatagtaccgctatgg

SEQ ID NO: 1145 - DNA, 101 bp, synthetic construct
  source 1..101: mol_type = other DNA
gatcgctcgggcaagttttagagctacctcgtactagtctcgcatgaccttttttttcagccaactccaattttttttggtcatgcgagactagtacgagg

SEQ ID NO: 1146 - DNA, 101 bp, synthetic construct
  source 1..101: mol_type = other DNA
gacccgcccacacggttttagagctacctcgtactagtctcgcatgaccttttttttcagccaactccaattttttttggtcatgcgagactagtacgagg

SEQ ID NO: 1147 - DNA, 102 bp, synthetic construct
  source 1..102: mol_type = other DNA
gaacctggggaggcggttttagagctacctcgtactagtctcgcatgaccttttttttcagccaactccaattttttttggtcatgcgagactagtacgagg

SEQ ID NO: 1148 - DNA, 101 bp, synthetic construct
  source 1..101: mol_type = other DNA
gttggctgggagcggttttagagctacctcgtactagtctcgcatgaccttttttttcagccaactccaattttttttggtcatgcgagactagtacgagg

SEQ ID NO: 1149 - DNA, 101 bp, synthetic construct
  source 1..101: mol_type = other DNA
gatcgctcgggcaagttttagagctaccgatagtgctaaacgacgctttttttttttcagccaactccaattttttttaaagcgtcgtttagcactatcgg

SEQ ID NO: 1150 - DNA, 101 bp, synthetic construct
  source 1..101: mol_type = other DNA
gacccgcccacacggttttagagctaccgatagtgctaaacgacgctttttttttttcagccaactccaattttttttaaagcgtcgtttagcactatcgg

SEQ ID NO: 1151 - DNA, 102 bp, synthetic construct
  source 1..102: mol_type = other DNA
gaacctggggaggcggttttagagctaccgatagtgctaaacgacgctttttttttttcagccaactccaattttttttaaagcgtcgtttagcactatcgg

SEQ ID NO: 1152 - DNA, 101 bp, synthetic construct
  source 1..101: mol_type = other DNA
gttggctgggagcggttttagagctaccgatagtgctaaacgacgctttttttttttcagccaactccaattttttttaaagcgtcgtttagcactatcgg

SEQ ID NO: 1153 - DNA, 101 bp, synthetic construct
  source 1..101: mol_type = other DNA
gatcgctcgggcaagttttagagctacccgttatcgacgttcaaggaacttttttttcagccaactccaattttttttgttccttgaacgtcgataacggg

SEQ ID NO: 1154 - DNA, 101 bp, synthetic construct
  source 1..101: mol_type = other DNA
gacccgcccacacggttttagagctacccgttatcgacgttcaaggaacttttttttcagccaactccaattttttttgttccttgaacgtcgataacggg

SEQ ID NO: 1155 - DNA, 102 bp, synthetic construct
  source 1..102: mol_type = other DNA
gaacctggggaggcggttttagagctacccgttatcgacgttcaaggaacttttttttcagccaactccaattttttttgttccttgaacgtcgataacggg

SEQ ID NO: 1156 - DNA, 101 bp, synthetic construct
  source 1..101: mol_type = other DNA
gttggctgggagcggttttagagctacccgttatcgacgttcaaggaacttttttttcagccaactccaattttttttgttccttgaacgtcgataacggg

SEQ ID NO: 1157 - DNA, 101 bp, synthetic construct
  source 1..101: mol_type = other DNA
gatcgctcgggcaagttttagagctaccgatcaatgcggtctgcgtaacttttttttcagccaactccaattttttttgttacgcagaccgcattgatcgg

SEQ ID NO: 1158 - DNA, 101 bp, synthetic construct
  source 1..101: mol_type = other DNA
gacccgcccacacggttttagagctaccgatcaatgcggtctgcgtaacttttttttcagccaactccaattttttttgttacgcagaccgcattgatcgg

SEQ ID NO: 1159 - DNA, 102 bp, synthetic construct
  source 1..102: mol_type = other DNA
gaacctggggaggcggttttagagctaccgatcaatgcggtctgcgtaacttttttttcagccaactccaattttttttgttacgcagaccgcattgatcgg

SEQ ID NO: 1160 - DNA, 101 bp, synthetic construct
  source 1..101: mol_type = other DNA
gttggctgggagcggttttagagctaccgatcaatgcggtctgcgtaacttttttttcagccaactccaattttttttgttacgcagaccgcattgatcgg

SEQ ID NO: 1161 - DNA, 101 bp, synthetic construct
  source 1..101: mol_type = other DNA
gatcgctcgggcaagttttagagctacccttactcgcgatactctcgacttttttttcagccaactccaattttttttgtcgagagtatcgcgagtaaggg

SEQ ID NO: 1162 - DNA, 101 bp, synthetic construct
  source 1..101: mol_type = other DNA
gacccgcccacacggttttagagctacccttactcgcgatactctcgacttttttttcagccaactccaattttttttgtcgagagtatcgcgagtaaggg

SEQ ID NO: 1163 - DNA, 102 bp, synthetic construct
  source 1..102: mol_type = other DNA
gaacctggggaggcggttttagagctacccttactcgcgatactctcgacttttttttcagccaactccaattttttttgtcgagagtatcgcgagtaaggg

SEQ ID NO: 1164 - DNA, 101 bp, synthetic construct
  source 1..101: mol_type = other DNA
gttggctgggagcggttttagagctacccttactcgcgatactctcgacttttttttcagccaactccaattttttttgtcgagagtatcgcgagtaaggg

SEQ ID NO: 1165 - DNA, 101 bp, synthetic construct
  source 1..101: mol_type = other DNA
gatcgctcgggcaagttttagagctaccgcggacggtaagcacggaatattttttttcagccaactccaatttttttttattccgtgcttaccgtccgcgg

SEQ ID NO: 1166 - DNA, 101 bp, synthetic construct
  source 1..101: mol_type = other DNA
gacccgcccacacggttttagagctaccgcggacggtaagcacggaatattttttttcagccaactccaatttttttttattccgtgcttaccgtccgcgg

SEQ ID NO: 1167 - DNA, 102 bp, synthetic construct
  source 1..102: mol_type = other DNA
gaacctggggaggcggttttagagctaccgcggacggtaagcacggaatattttttttcagccaactccaatttttttttattccgtgcttaccgtccgcgg

SEQ ID NO: 1168 - DNA, 101 bp, synthetic construct
  source 1..101: mol_type = other DNA
gttggctgggagcggttttagagctaccgcggacggtaagcacggaatattttttttcagccaactccaatttttttttattccgtgcttaccgtccgcgg

SEQ ID NO: 1169 - DNA, 101 bp, synthetic construct
  source 1..101: mol_type = other DNA
gatcgctcgggcaagttttagagctacctatagtcacgaatcgtagggtttttttttcagccaactccaattttttttaccctacgattcgtgactatagg

SEQ ID NO: 1170 - DNA, 101 bp, synthetic construct
  source 1..101: mol_type = other DNA
gacccgcccacacggttttagagctacctatagtcacgaatcgtagggtttttttttcagccaactccaattttttttaccctacgattcgtgactatagg

SEQ ID NO: 1171 - DNA, 102 bp, synthetic construct
  source 1..102: mol_type = other DNA
gaacctggggaggcggttttagagctacctatagtcacgaatcgtagggtttttttttcagccaactccaattttttttaccctacgattcgtgactatagg

SEQ ID NO: 1172 - DNA, 101 bp, synthetic construct
  source 1..101: mol_type = other DNA
gttggctgggagcggttttagagctacctatagtcacgaatcgtagggtttttttttcagccaactccaattttttttaccctacgattcgtgactatagg

SEQ ID NO: 1173 - DNA, 101 bp, synthetic construct
  source 1..101: mol_type = other DNA
gatcgctcgggcaagttttagagctacccgtcgtcacgtatgcgtagcattttttttcagccaactccaatttttttttgctacgcatacgtgacgacggg

SEQ ID NO: 1174 - DNA, 101 bp, synthetic construct
  source 1..101: mol_type = other DNA
gacccgcccacacggttttagagctacccgtcgtcacgtatgcgtagcattttttttcagccaactccaatttttttttgctacgcatacgtgacgacggg

SEQ ID NO: 1175 - DNA, 102 bp, synthetic construct
  source 1..102: mol_type = other DNA
gaacctggggaggcggttttagagctacccgtcgtcacgtatgcgtagcattttttttcagccaactccaatttttttttgctacgcatacgtgacgacggg

SEQ ID NO: 1176 - DNA, 101 bp, synthetic construct
  source 1..101: mol_type = other DNA
gttggctgggagcggttttagagctacccgtcgtcacgtatgcgtagcattttttttcagccaactccaatttttttttgctacgcatacgtgacgacggg

SEQ ID NO: 1177 - DNA, 101 bp, synthetic construct
  source 1..101: mol_type = other DNA
gatcgctcgggcaagttttagagctacccgagaggtagtagacgacgcattttttttcagccaactccaatttttttttgcgtcgtctactacctctcggg

SEQ ID NO: 1178 - DNA, 101 bp, synthetic construct
  source 1..101: mol_type = other DNA
gacccgcccacacggttttagagctacccgagaggtagtagacgacgcattttttttcagccaactccaatttttttttgcgtcgtctactacctctcggg

SEQ ID NO: 1179 - DNA, 102 bp, synthetic construct
  source 1..102: mol_type = other DNA
gaacctggggaggcggttttagagctacccgagaggtagtagacgacgcattttttttcagccaactccaatttttttttgcgtcgtctactacctctcggg

SEQ ID NO: 1180 - DNA, 101 bp, synthetic construct
  source 1..101: mol_type = other DNA
gttggctgggagcggttttagagctacccgagaggtagtagacgacgcattttttttcagccaactccaatttttttttgcgtcgtctactacctctcggg

SEQ ID NO: 1181 - DNA, 101 bp, synthetic construct
  source 1..101: mol_type = other DNA
gatcgctcgggcaagttttagagctaccgacgtctacggacgggagctattttttttcagccaactccaatttttttttagctcccgtccgtagacgtcgg

SEQ ID NO: 1182 - DNA, 101 bp, synthetic construct
  source 1..101: mol_type = other DNA
gacccgcccacacggttttagagctaccgacgtctacggacgggagctattttttttcagccaactccaatttttttttagctcccgtccgtagacgtcgg

SEQ ID NO: 1183 - DNA, 102 bp, synthetic construct
  source 1..102: mol_type = other DNA
gaacctggggaggcggttttagagctaccgacgtctacggacgggagctattttttttcagccaactccaatttttttttagctcccgtccgtagacgtcgg

SEQ ID NO: 1184 - DNA, 101 bp, synthetic construct
  source 1..101: mol_type = other DNA
gttggctgggagcggttttagagctaccgacgtctacggacgggagctattttttttcagccaactccaatttttttttagctcccgtccgtagacgtcgg

SEQ ID NO: 1185 - DNA, 101 bp, synthetic construct
  source 1..101: mol_type = other DNA
gatcgctcgggcaagttttagagctaccaaagctcattcgcgactgagcttttttttcagccaactccaattttttttgctcagtcgcgaatgagctttgg

SEQ ID NO: 1186 - DNA, 101 bp, synthetic construct
  source 1..101: mol_type = other DNA
gacccgcccacacggttttagagctaccaaagctcattcgcgactgagcttttttttcagccaactccaattttttttgctcagtcgcgaatgagctttgg

SEQ ID NO: 1187 - DNA, 102 bp, synthetic construct
  source 1..102: mol_type = other DNA
gaacctggggaggcggttttagagctaccaaagctcattcgcgactgagcttttttttcagccaactccaattttttttgctcagtcgcgaatgagctttgg

SEQ ID NO: 1188 - DNA, 101 bp, synthetic construct
  source 1..101: mol_type = other DNA
gttggctgggagcggttttagagctaccaaagctcattcgcgactgagcttttttttcagccaactccaattttttttgctcagtcgcgaatgagctttgg

SEQ ID NO: 1189 - DNA, 101 bp, synthetic construct
  source 1..101: mol_type = other DNA
gatcgctcgggcaagttttagagctaccatggcacgatcgacacggaggttttttttcagccaactccaattttttttcctccgtgtcgatcgtgccatgg

SEQ ID NO: 1190 - DNA, 101 bp, synthetic construct
  source 1..101: mol_type = other DNA
gacccgcccacacggttttagagctaccatggcacgatcgacacggaggttttttttcagccaactccaattttttttcctccgtgtcgatcgtgccatgg

SEQ ID NO: 1191 - DNA, 102 bp, synthetic construct
  source 1..102: mol_type = other DNA
gaacctggggaggcggttttagagctaccatggcacgatcgacacggaggttttttttcagccaactccaattttttttcctccgtgtcgatcgtgccatgg

SEQ ID NO: 1192 - DNA, 101 bp, synthetic construct
  source 1..101: mol_type = other DNA
gttggctgggagcggttttagagctaccatggcacgatcgacacggaggttttttttcagccaactccaattttttttcctccgtgtcgatcgtgccatgg

SEQ ID NO: 1193 - DNA, 101 bp, synthetic construct
  source 1..101: mol_type = other DNA
gatcgctcgggcaagttttagagctacccgaactctctatcgaacgagtttttttttcagccaactccaattttttttactcgttcgatagagagttcggg

SEQ ID NO: 1194 - DNA, 101 bp, synthetic construct
  source 1..101: mol_type = other DNA
gacccgcccacacggttttagagctacccgaactctctatcgaacgagtttttttttcagccaactccaattttttttactcgttcgatagagagttcggg

SEQ ID NO: 1195 - DNA, 102 bp, synthetic construct
  source 1..102: mol_type = other DNA
gaacctggggaggcggttttagagctacccgaactctctatcgaacgagtttttttttcagccaactccaattttttttactcgttcgatagagagttcggg

SEQ ID NO: 1196 - DNA, 101 bp, synthetic construct
  source 1..101: mol_type = other DNA
gttggctgggagcggttttagagctacccgaactctctatcgaacgagtttttttttcagccaactccaattttttttactcgttcgatagagagttcggg

SEQ ID NO: 1197 - DNA, 104 bp, synthetic construct
  source 1..104: mol_type = other DNA
gtacggtctccggcggttttagagctaccgtcgttgtaccgtctacttgacttttttttcagccaactccaattttttttgtcaagtagacggtacaacgacgg

SEQ ID NO: 1198 - DNA, 103 bp, synthetic construct
  source 1..103: mol_type = other DNA
gcctcccgcgtggagttttagagctaccgtcgttgtaccgtctacttgacttttttttcagccaactccaattttttttgtcaagtagacggtacaacgacgg

SEQ ID NO: 1199 - DNA, 104 bp, synthetic construct
  source 1..104: mol_type = other DNA
gcagcgggggatacggttttagagctaccgtcgttgtaccgtctacttgacttttttttcagccaactccaattttttttgtcaagtagacggtacaacgacgg

SEQ ID NO: 1200 - DNA, 104 bp, synthetic construct
  source 1..104: mol_type = other DNA
gccccccgtggccgggttttagagctaccgtcgttgtaccgtctacttgacttttttttcagccaactccaattttttttgtcaagtagacggtacaacgacgg

SEQ ID NO: 1201 - DNA, 102 bp, synthetic construct
  source 1..102: mol_type = other DNA
gtacggtctccggcggttttagagctacctacactcgacatcggtagctattttttttcagccaactccaatttttttttagctaccgatgtcgagtgtagg

SEQ ID NO: 1202 - DNA, 101 bp, synthetic construct
  source 1..101: mol_type = other DNA
gcctcccgcgtggagttttagagctacctacactcgacatcggtagctattttttttcagccaactccaatttttttttagctaccgatgtcgagtgtagg

SEQ ID NO: 1203 - DNA, 102 bp, synthetic construct
  source 1..102: mol_type = other DNA
gcagcgggggatacggttttagagctacctacactcgacatcggtagctattttttttcagccaactccaatttttttttagctaccgatgtcgagtgtagg

SEQ ID NO: 1204 - DNA, 102 bp, synthetic construct
  source 1..102: mol_type = other DNA
gccccccgtggccgggttttagagctacctacactcgacatcggtagctattttttttcagccaactccaatttttttttagctaccgatgtcgagtgtagg

SEQ ID NO: 1205 - DNA, 102 bp, synthetic construct
  source 1..102: mol_type = other DNA
gtacggtctccggcggttttagagctaccctggcggaacgttcgagtaatttttttttcagccaactccaattttttttattactcgaacgttccgccaggg

SEQ ID NO: 1206 - DNA, 101 bp, synthetic construct
  source 1..101: mol_type = other DNA
gcctcccgcgtggagttttagagctaccctggcggaacgttcgagtaatttttttttcagccaactccaattttttttattactcgaacgttccgccaggg

SEQ ID NO: 1207 - DNA, 102 bp, synthetic construct
  source 1..102: mol_type = other DNA
gcagcgggggatacggttttagagctaccctggcggaacgttcgagtaatttttttttcagccaactccaattttttttattactcgaacgttccgccaggg

SEQ ID NO: 1208 - DNA, 102 bp, synthetic construct
  source 1..102: mol_type = other DNA
gccccccgtggccgggttttagagctaccctggcggaacgttcgagtaatttttttttcagccaactccaattttttttattactcgaacgttccgccaggg

SEQ ID NO: 1209 - DNA, 102 bp, synthetic construct
  source 1..102: mol_type = other DNA
gtacggtctccggcggttttagagctacctacacgatagtggtcgtgcgcttttttttcagccaactccaattttttttgcgcacgaccactatcgtgtagg

SEQ ID NO: 1210 - DNA, 101 bp, synthetic construct
  source 1..101: mol_type = other DNA
gcctcccgcgtggagttttagagctacctacacgatagtggtcgtgcgcttttttttcagccaactccaattttttttgcgcacgaccactatcgtgtagg

SEQ ID NO: 1211 - DNA, 102 bp, synthetic construct
  source 1..102: mol_type = other DNA
gcagcgggggatacggttttagagctacctacacgatagtggtcgtgcgcttttttttcagccaactccaattttttttgcgcacgaccactatcgtgtagg

SEQ ID NO: 1212 - DNA, 102 bp, synthetic construct
  source 1..102: mol_type = other DNA
gccccccgtggccgggttttagagctacctacacgatagtggtcgtgcgcttttttttcagccaactccaattttttttgcgcacgaccactatcgtgtagg

SEQ ID NO: 1213 - DNA, 104 bp, synthetic construct
  source 1..104: mol_type = other DNA
gtacggtctccggcggttttagagctaccttcccgacttccgtaggagcgcttttttttcagccaactccaattttttttgcgctcctacggaagtcgggaagg

SEQ ID NO: 1214 - DNA, 103 bp, synthetic construct
  source 1..103: mol_type = other DNA
gcctcccgcgtggagttttagagctaccttcccgacttccgtaggagcgcttttttttcagccaactccaattttttttgcgctcctacggaagtcgggaagg

SEQ ID NO: 1215 - DNA, 104 bp, synthetic construct
  source 1..104: mol_type = other DNA
gcagcgggggatacggttttagagctaccttcccgacttccgtaggagcgcttttttttcagccaactccaattttttttgcgctcctacggaagtcgggaagg

SEQ ID NO: 1216 - DNA, 104 bp, synthetic construct
  source 1..104: mol_type = other DNA
gccccccgtggccgggttttagagctaccttcccgacttccgtaggagcgcttttttttcagccaactccaattttttttgcgctcctacggaagtcgggaagg

SEQ ID NO: 1217 - DNA, 104 bp, synthetic construct
  source 1..104: mol_type = other DNA
gtacggtctccggcggttttagagctacctgaaggtaaagatcgggtcctcttttttttcagccaactccaattttttttgaggacccgatctttaccttcagg

SEQ ID NO: 1218 - DNA, 103 bp, synthetic construct
  source 1..103: mol_type = other DNA
gcctcccgcgtggagttttagagctacctgaaggtaaagatcgggtcctcttttttttcagccaactccaattttttttgaggacccgatctttaccttcagg

SEQ ID NO: 1219 - DNA, 104 bp, synthetic construct
  source 1..104: mol_type = other DNA
gcagcgggggatacggttttagagctacctgaaggtaaagatcgggtcctcttttttttcagccaactccaattttttttgaggacccgatctttaccttcagg

SEQ ID NO: 1220 - DNA, 104 bp, synthetic construct
  source 1..104: mol_type = other DNA
gccccccgtggccgggttttagagctacctgaaggtaaagatcgggtcctcttttttttcagccaactccaattttttttgaggacccgatctttaccttcagg

SEQ ID NO: 1221 - DNA, 102 bp, synthetic construct
  source 1..102: mol_type = other DNA
gtacggtctccggcggttttagagctacctggttatagcggacgcactgtttttttttcagccaactccaattttttttacagtgcgtccgctataaccagg

SEQ ID NO: 1222 - DNA, 101 bp, synthetic construct
  source 1..101: mol_type = other DNA
gcctcccgcgtggagttttagagctacctggttatagcggacgcactgtttttttttcagccaactccaattttttttacagtgcgtccgctataaccagg

SEQ ID NO: 1223 - DNA, 102 bp, synthetic construct
  source 1..102: mol_type = other DNA
gcagcgggggatacggttttagagctacctggttatagcggacgcactgtttttttttcagccaactccaattttttttacagtgcgtccgctataaccagg

SEQ ID NO: 1224 - DNA, 102 bp, synthetic construct
  source 1..102: mol_type = other DNA
gccccccgtggccgggttttagagctacctggttatagcggacgcactgtttttttttcagccaactccaattttttttacagtgcgtccgctataaccagg

SEQ ID NO: 1225 - DNA, 102 bp, synthetic construct
  source 1..102: mol_type = other DNA
gtacggtctccggcggttttagagctaccgcatcgtattatctgcgaagcttttttttcagccaactccaattttttttgcttcgcagataatacgatgcgg

SEQ ID NO: 1226 - DNA, 101 bp, synthetic construct
  source 1..101: mol_type = other DNA
gcctcccgcgtggagttttagagctaccgcatcgtattatctgcgaagcttttttttcagccaactccaattttttttgcttcgcagataatacgatgcgg

SEQ ID NO: 1227 - DNA, 102 bp, synthetic construct
  source 1..102: mol_type = other DNA
gcagcgggggatacggttttagagctaccgcatcgtattatctgcgaagcttttttttcagccaactccaattttttttgcttcgcagataatacgatgcgg

SEQ ID NO: 1228 - DNA, 102 bp, synthetic construct
  source 1..102: mol_type = other DNA
gccccccgtggccgggttttagagctaccgcatcgtattatctgcgaagcttttttttcagccaactccaattttttttgcttcgcagataatacgatgcgg

SEQ ID NO: 1229 - DNA, 102 bp, synthetic construct
  source 1..102: mol_type = other DNA
gtacggtctccggcggttttagagctaccgctaggacgttcaacggagtcttttttttcagccaactccaattttttttgactccgttgaacgtcctagcgg

SEQ ID NO: 1230 - DNA, 101 bp, synthetic construct
  source 1..101: mol_type = other DNA
gcctcccgcgtggagttttagagctaccgctaggacgttcaacggagtcttttttttcagccaactccaattttttttgactccgttgaacgtcctagcgg

SEQ ID NO: 1231 - DNA, 102 bp, synthetic construct
  source 1..102: mol_type = other DNA
gcagcgggggatacggttttagagctaccgctaggacgttcaacggagtcttttttttcagccaactccaattttttttgactccgttgaacgtcctagcgg

SEQ ID NO: 1232 - DNA, 102 bp, synthetic construct
  source 1..102: mol_type = other DNA
gccccccgtggccgggttttagagctaccgctaggacgttcaacggagtcttttttttcagccaactccaattttttttgactccgttgaacgtcctagcgg

SEQ ID NO: 1233 - DNA, 102 bp, synthetic construct
  source 1..102: mol_type = other DNA
gtacggtctccggcggttttagagctaccatagcggtactatcggcatctttttttttcagccaactccaattttttttagatgccgatagtaccgctatgg

SEQ ID NO: 1234 - DNA, 101 bp, synthetic construct
  source 1..101: mol_type = other DNA
gcctcccgcgtggagttttagagctaccatagcggtactatcggcatctttttttttcagccaactccaattttttttagatgccgatagtaccgctatgg

SEQ ID NO: 1235 - DNA, 102 bp, synthetic construct
  source 1..102: mol_type = other DNA
gcagcgggggatacggttttagagctaccatagcggtactatcggcatctttttttttcagccaactccaattttttttagatgccgatagtaccgctatgg

SEQ ID NO: 1236 - DNA, 102 bp, synthetic construct
  source 1..102: mol_type = other DNA
gccccccgtggccgggttttagagctaccatagcggtactatcggcatctttttttttcagccaactccaattttttttagatgccgatagtaccgctatgg

SEQ ID NO: 1237 - DNA, 102 bp, synthetic construct
  source 1..102: mol_type = other DNA
gtacggtctccggcggttttagagctacctcgtactagtctcgcatgaccttttttttcagccaactccaattttttttggtcatgcgagactagtacgagg

SEQ ID NO: 1238 - DNA, 101 bp, synthetic construct
  source 1..101: mol_type = other DNA
gcctcccgcgtggagttttagagctacctcgtactagtctcgcatgaccttttttttcagccaactccaattttttttggtcatgcgagactagtacgagg

SEQ ID NO: 1239 - DNA, 102 bp, synthetic construct
  source 1..102: mol_type = other DNA
gcagcgggggatacggttttagagctacctcgtactagtctcgcatgaccttttttttcagccaactccaattttttttggtcatgcgagactagtacgagg

SEQ ID NO: 1240 - DNA, 102 bp, synthetic construct
  source 1..102: mol_type = other DNA
gccccccgtggccgggttttagagctacctcgtactagtctcgcatgaccttttttttcagccaactccaattttttttggtcatgcgagactagtacgagg

SEQ ID NO: 1241 - DNA, 102 bp, synthetic construct
  source 1..102: mol_type = other DNA
gtacggtctccggcggttttagagctaccgatagtgctaaacgacgctttttttttttcagccaactccaattttttttaaagcgtcgtttagcactatcgg

SEQ ID NO: 1242 - DNA, 101 bp, synthetic construct
  source 1..101: mol_type = other DNA
gcctcccgcgtggagttttagagctaccgatagtgctaaacgacgctttttttttttcagccaactccaattttttttaaagcgtcgtttagcactatcgg

SEQ ID NO: 1243 - DNA, 102 bp, synthetic construct
  source 1..102: mol_type = other DNA
gcagcgggggatacggttttagagctaccgatagtgctaaacgacgctttttttttttcagccaactccaattttttttaaagcgtcgtttagcactatcgg

SEQ ID NO: 1244 - DNA, 102 bp, synthetic construct
  source 1..102: mol_type = other DNA
gccccccgtggccgggttttagagctaccgatagtgctaaacgacgctttttttttttcagccaactccaattttttttaaagcgtcgtttagcactatcgg

SEQ ID NO: 1245 - DNA, 102 bp, synthetic construct
  source 1..102: mol_type = other DNA
gtacggtctccggcggttttagagctacccgttatcgacgttcaaggaacttttttttcagccaactccaattttttttgttccttgaacgtcgataacggg

SEQ ID NO: 1246 - DNA, 101 bp, synthetic construct
  source 1..101: mol_type = other DNA
gcctcccgcgtggagttttagagctacccgttatcgacgttcaaggaacttttttttcagccaactccaattttttttgttccttgaacgtcgataacggg

SEQ ID NO: 1247 - DNA, 102 bp, synthetic construct
  source 1..102: mol_type = other DNA
gcagcgggggatacggttttagagctacccgttatcgacgttcaaggaacttttttttcagccaactccaattttttttgttccttgaacgtcgataacggg

SEQ ID NO: 1248 - DNA, 102 bp, synthetic construct
  source 1..102: mol_type = other DNA
gccccccgtggccgggttttagagctacccgttatcgacgttcaaggaacttttttttcagccaactccaattttttttgttccttgaacgtcgataacggg

SEQ ID NO: 1249 - DNA, 102 bp, synthetic construct
  source 1..102: mol_type = other DNA
gtacggtctccggcggttttagagctaccgatcaatgcggtctgcgtaacttttttttcagccaactccaattttttttgttacgcagaccgcattgatcgg

SEQ ID NO: 1250 - DNA, 101 bp, synthetic construct
  source 1..101: mol_type = other DNA
gcctcccgcgtggagttttagagctaccgatcaatgcggtctgcgtaacttttttttcagccaactccaattttttttgttacgcagaccgcattgatcgg

SEQ ID NO: 1251 - DNA, 102 bp, synthetic construct
  source 1..102: mol_type = other DNA
gcagcgggggatacggttttagagctaccgatcaatgcggtctgcgtaacttttttttcagccaactccaattttttttgttacgcagaccgcattgatcgg

SEQ ID NO: 1252 - DNA, 102 bp, synthetic construct
  source 1..102: mol_type = other DNA
gccccccgtggccgggttttagagctaccgatcaatgcggtctgcgtaacttttttttcagccaactccaattttttttgttacgcagaccgcattgatcgg

SEQ ID NO: 1253 - DNA, 102 bp, synthetic construct
  source 1..102: mol_type = other DNA
gtacggtctccggcggttttagagctacccttactcgcgatactctcgacttttttttcagccaactccaattttttttgtcgagagtatcgcgagtaaggg

SEQ ID NO: 1254 - DNA, 101 bp, synthetic construct
  source 1..101: mol_type = other DNA
gcctcccgcgtggagttttagagctacccttactcgcgatactctcgacttttttttcagccaactccaattttttttgtcgagagtatcgcgagtaaggg

SEQ ID NO: 1255 - DNA, 102 bp, synthetic construct
  source 1..102: mol_type = other DNA
gcagcgggggatacggttttagagctacccttactcgcgatactctcgacttttttttcagccaactccaattttttttgtcgagagtatcgcgagtaaggg

SEQ ID NO: 1256 - DNA, 102 bp, synthetic construct
  source 1..102: mol_type = other DNA
gccccccgtggccgggttttagagctacccttactcgcgatactctcgacttttttttcagccaactccaattttttttgtcgagagtatcgcgagtaaggg

SEQ ID NO: 1257 - DNA, 102 bp, synthetic construct
  source 1..102: mol_type = other DNA
gtacggtctccggcggttttagagctaccgcggacggtaagcacggaatattttttttcagccaactccaatttttttttattccgtgcttaccgtccgcgg

SEQ ID NO: 1258 - DNA, 101 bp, synthetic construct
  source 1..101: mol_type = other DNA
gcctcccgcgtggagttttagagctaccgcggacggtaagcacggaatattttttttcagccaactccaatttttttttattccgtgcttaccgtccgcgg

SEQ ID NO: 1259 - DNA, 102 bp, synthetic construct
  source 1..102: mol_type = other DNA
gcagcgggggatacggttttagagctaccgcggacggtaagcacggaatattttttttcagccaactccaatttttttttattccgtgcttaccgtccgcgg

SEQ ID NO: 1260 - DNA, 102 bp, synthetic construct
  source 1..102: mol_type = other DNA
gccccccgtggccgggttttagagctaccgcggacggtaagcacggaatattttttttcagccaactccaatttttttttattccgtgcttaccgtccgcgg

SEQ ID NO: 1261 - DNA, 102 bp, synthetic construct
  source 1..102: mol_type = other DNA
gtacggtctccggcggttttagagctacctatagtcacgaatcgtagggtttttttttcagccaactccaattttttttaccctacgattcgtgactatagg

SEQ ID NO: 1262 - DNA, 101 bp, synthetic construct
  source 1..101: mol_type = other DNA
gcctcccgcgtggagttttagagctacctatagtcacgaatcgtagggtttttttttcagccaactccaattttttttaccctacgattcgtgactatagg

SEQ ID NO: 1263 - DNA, 102 bp, synthetic construct
  source 1..102: mol_type = other DNA
gcagcgggggatacggttttagagctacctatagtcacgaatcgtagggtttttttttcagccaactccaattttttttaccctacgattcgtgactatagg

SEQ ID NO: 1264 - DNA, 102 bp, synthetic construct
  source 1..102: mol_type = other DNA
gccccccgtggccgggttttagagctacctatagtcacgaatcgtagggtttttttttcagccaactccaattttttttaccctacgattcgtgactatagg

SEQ ID NO: 1265 - DNA, 102 bp, synthetic construct
  source 1..102: mol_type = other DNA
gtacggtctccggcggttttagagctacccgtcgtcacgtatgcgtagcattttttttcagccaactccaatttttttttgctacgcatacgtgacgacggg

SEQ ID NO: 1266 - DNA, 101 bp, synthetic construct
  source 1..101: mol_type = other DNA
gcctcccgcgtggagttttagagctacccgtcgtcacgtatgcgtagcattttttttcagccaactccaatttttttttgctacgcatacgtgacgacggg

SEQ ID NO: 1267 - DNA, 102 bp, synthetic construct
  source 1..102: mol_type = other DNA
gcagcgggggatacggttttagagctacccgtcgtcacgtatgcgtagcattttttttcagccaactccaatttttttttgctacgcatacgtgacgacggg

SEQ ID NO: 1268 - DNA, 102 bp, synthetic construct
  source 1..102: mol_type = other DNA
gccccccgtggccgggttttagagctacccgtcgtcacgtatgcgtagcattttttttcagccaactccaatttttttttgctacgcatacgtgacgacggg

SEQ ID NO: 1269 - DNA, 102 bp, synthetic construct
  source 1..102: mol_type = other DNA
gtacggtctccggcggttttagagctacccgagaggtagtagacgacgcattttttttcagccaactccaatttttttttgcgtcgtctactacctctcggg

SEQ ID NO: 1270 - DNA, 101 bp, synthetic construct
  source 1..101: mol_type = other DNA
gcctcccgcgtggagttttagagctacccgagaggtagtagacgacgcattttttttcagccaactccaatttttttttgcgtcgtctactacctctcggg

SEQ ID NO: 1271 - DNA, 102 bp, synthetic construct
  source 1..102: mol_type = other DNA
gcagcgggggatacggttttagagctacccgagaggtagtagacgacgcattttttttcagccaactccaatttttttttgcgtcgtctactacctctcggg

SEQ ID NO: 1272 - DNA, 102 bp, synthetic construct
  source 1..102: mol_type = other DNA
gccccccgtggccgggttttagagctacccgagaggtagtagacgacgcattttttttcagccaactccaatttttttttgcgtcgtctactacctctcggg

SEQ ID NO: 1273 - DNA, 102 bp, synthetic construct
  source 1..102: mol_type = other DNA
gtacggtctccggcggttttagagctaccgacgtctacggacgggagctattttttttcagccaactccaatttttttttagctcccgtccgtagacgtcgg

SEQ ID NO: 1274 - DNA, 101 bp, synthetic construct
  source 1..101: mol_type = other DNA
gcctcccgcgtggagttttagagctaccgacgtctacggacgggagctattttttttcagccaactccaatttttttttagctcccgtccgtagacgtcgg

SEQ ID NO: 1275 - DNA, 102 bp, synthetic construct
  source 1..102: mol_type = other DNA
gcagcgggggatacggttttagagctaccgacgtctacggacgggagctattttttttcagccaactccaatttttttttagctcccgtccgtagacgtcgg

SEQ ID NO: 1276 - DNA, 102 bp, synthetic construct
  source 1..102: mol_type = other DNA
gccccccgtggccgggttttagagctaccgacgtctacggacgggagctattttttttcagccaactccaatttttttttagctcccgtccgtagacgtcgg

SEQ ID NO: 1277 - DNA, 102 bp, synthetic construct
  source 1..102: mol_type = other DNA
gtacggtctccggcggttttagagctaccaaagctcattcgcgactgagcttttttttcagccaactccaattttttttgctcagtcgcgaatgagctttgg

SEQ ID NO: 1278 - DNA, 101 bp, synthetic construct
  source 1..101: mol_type = other DNA
gcctcccgcgtggagttttagagctaccaaagctcattcgcgactgagcttttttttcagccaactccaattttttttgctcagtcgcgaatgagctttgg

SEQ ID NO: 1279 - DNA, 102 bp, synthetic construct
  source 1..102: mol_type = other DNA
gcagcgggggatacggttttagagctaccaaagctcattcgcgactgagcttttttttcagccaactccaattttttttgctcagtcgcgaatgagctttgg

SEQ ID NO: 1280 - DNA, 102 bp, synthetic construct
  source 1..102: mol_type = other DNA
gccccccgtggccgggttttagagctaccaaagctcattcgcgactgagcttttttttcagccaactccaattttttttgctcagtcgcgaatgagctttgg

SEQ ID NO: 1281 - DNA, 102 bp, synthetic construct
  source 1..102: mol_type = other DNA
gtacggtctccggcggttttagagctaccatggcacgatcgacacggaggttttttttcagccaactccaattttttttcctccgtgtcgatcgtgccatgg

SEQ ID NO: 1282 - DNA, 101 bp, synthetic construct
  source 1..101: mol_type = other DNA
gcctcccgcgtggagttttagagctaccatggcacgatcgacacggaggttttttttcagccaactccaattttttttcctccgtgtcgatcgtgccatgg

SEQ ID NO: 1283 - DNA, 102 bp, synthetic construct
  source 1..102: mol_type = other DNA
gcagcgggggatacggttttagagctaccatggcacgatcgacacggaggttttttttcagccaactccaattttttttcctccgtgtcgatcgtgccatgg

SEQ ID NO: 1284 - DNA, 102 bp, synthetic construct
  source 1..102: mol_type = other DNA
gccccccgtggccgggttttagagctaccatggcacgatcgacacggaggttttttttcagccaactccaattttttttcctccgtgtcgatcgtgccatgg

SEQ ID NO: 1285 - DNA, 102 bp, synthetic construct
  source 1..102: mol_type = other DNA
gtacggtctccggcggttttagagctacccgaactctctatcgaacgagtttttttttcagccaactccaattttttttactcgttcgatagagagttcggg

SEQ ID NO: 1286 - DNA, 101 bp, synthetic construct
  source 1..101: mol_type = other DNA
gcctcccgcgtggagttttagagctacccgaactctctatcgaacgagtttttttttcagccaactccaattttttttactcgttcgatagagagttcggg

SEQ ID NO: 1287 - DNA, 102 bp, synthetic construct
  source 1..102: mol_type = other DNA
gcagcgggggatacggttttagagctacccgaactctctatcgaacgagtttttttttcagccaactccaattttttttactcgttcgatagagagttcggg

SEQ ID NO: 1288 - DNA, 102 bp, synthetic construct
  source 1..102: mol_type = other DNA
gccccccgtggccgggttttagagctacccgaactctctatcgaacgagtttttttttcagccaactccaattttttttactcgttcgatagagagttcggg

SEQ ID NO: 1289 - DNA, 104 bp, synthetic construct
  source 1..104: mol_type = other DNA
gcggctaccgaaccggttttagagctaccgtcgttgtaccgtctacttgacttttttttcagccaactccaattttttttgtcaagtagacggtacaacgacgg

SEQ ID NO: 1290 - DNA, 104 bp, synthetic construct
  source 1..104: mol_type = other DNA
gcgccgcgacctagggttttagagctaccgtcgttgtaccgtctacttgacttttttttcagccaactccaattttttttgtcaagtagacggtacaacgacgg

SEQ ID NO: 1291 - DNA, 103 bp, synthetic construct
  source 1..103: mol_type = other DNA
gcgctggatggccagttttagagctaccgtcgttgtaccgtctacttgacttttttttcagccaactccaattttttttgtcaagtagacggtacaacgacgg

SEQ ID NO: 1292 - DNA, 103 bp, synthetic construct
  source 1..103: mol_type = other DNA
gccgctgcaatcccgttttagagctaccgtcgttgtaccgtctacttgacttttttttcagccaactccaattttttttgtcaagtagacggtacaacgacgg

SEQ ID NO: 1293 - DNA, 102 bp, synthetic construct
  source 1..102: mol_type = other DNA
gcggctaccgaaccggttttagagctacctacactcgacatcggtagctattttttttcagccaactccaatttttttttagctaccgatgtcgagtgtagg

SEQ ID NO: 1294 - DNA, 102 bp, synthetic construct
  source 1..102: mol_type = other DNA
gcgccgcgacctagggttttagagctacctacactcgacatcggtagctattttttttcagccaactccaatttttttttagctaccgatgtcgagtgtagg

SEQ ID NO: 1295 - DNA, 101 bp, synthetic construct
  source 1..101: mol_type = other DNA
gcgctggatggccagttttagagctacctacactcgacatcggtagctattttttttcagccaactccaatttttttttagctaccgatgtcgagtgtagg

SEQ ID NO: 1296 - DNA, 101 bp, synthetic construct
  source 1..101: mol_type = other DNA
gccgctgcaatcccgttttagagctacctacactcgacatcggtagctattttttttcagccaactccaatttttttttagctaccgatgtcgagtgtagg

SEQ ID NO: 1297 - DNA, 102 bp, synthetic construct
  source 1..102: mol_type = other DNA
gcggctaccgaaccggttttagagctaccctggcggaacgttcgagtaatttttttttcagccaactccaattttttttattactcgaacgttccgccaggg

SEQ ID NO: 1298 - DNA, 102 bp, synthetic construct
  source 1..102: mol_type = other DNA
gcgccgcgacctagggttttagagctaccctggcggaacgttcgagtaatttttttttcagccaactccaattttttttattactcgaacgttccgccaggg

SEQ ID NO: 1299 - DNA, 101 bp, synthetic construct
  source 1..101: mol_type = other DNA
gcgctggatggccagttttagagctaccctggcggaacgttcgagtaatttttttttcagccaactccaattttttttattactcgaacgttccgccaggg

SEQ ID NO: 1300 - DNA, 101 bp, synthetic construct
  source 1..101: mol_type = other DNA
gccgctgcaatcccgttttagagctaccctggcggaacgttcgagtaatttttttttcagccaactccaattttttttattactcgaacgttccgccaggg

SEQ ID NO: 1301 - DNA, 102 bp, synthetic construct
  source 1..102: mol_type = other DNA
gcggctaccgaaccggttttagagctacctacacgatagtggtcgtgcgcttttttttcagccaactccaattttttttgcgcacgaccactatcgtgtagg

SEQ ID NO: 1302 - DNA, 102 bp, synthetic construct
  source 1..102: mol_type = other DNA
gcgccgcgacctagggttttagagctacctacacgatagtggtcgtgcgcttttttttcagccaactccaattttttttgcgcacgaccactatcgtgtagg

SEQ ID NO: 1303 - DNA, 101 bp, synthetic construct
  source 1..101: mol_type = other DNA
gcgctggatggccagttttagagctacctacacgatagtggtcgtgcgcttttttttcagccaactccaattttttttgcgcacgaccactatcgtgtagg

SEQ ID NO: 1304 - DNA, 101 bp, synthetic construct
  source 1..101: mol_type = other DNA
gccgctgcaatcccgttttagagctacctacacgatagtggtcgtgcgcttttttttcagccaactccaattttttttgcgcacgaccactatcgtgtagg

SEQ ID NO: 1305 - DNA, 104 bp, synthetic construct
  source 1..104: mol_type = other DNA
gcggctaccgaaccggttttagagctaccttcccgacttccgtaggagcgcttttttttcagccaactccaattttttttgcgctcctacggaagtcgggaagg

SEQ ID NO: 1306 - DNA, 104 bp, synthetic construct
  source 1..104: mol_type = other DNA
gcgccgcgacctagggttttagagctaccttcccgacttccgtaggagcgcttttttttcagccaactccaattttttttgcgctcctacggaagtcgggaagg

SEQ ID NO: 1307 - DNA, 103 bp, synthetic construct
  source 1..103: mol_type = other DNA
gcgctggatggccagttttagagctaccttcccgacttccgtaggagcgcttttttttcagccaactccaattttttttgcgctcctacggaagtcgggaagg

SEQ ID NO: 1308 - DNA, 103 bp, synthetic construct
  source 1..103: mol_type = other DNA
gccgctgcaatcccgttttagagctaccttcccgacttccgtaggagcgcttttttttcagccaactccaattttttttgcgctcctacggaagtcgggaagg

SEQ ID NO: 1309 - DNA, 104 bp, synthetic construct
  source 1..104: mol_type = other DNA
gcggctaccgaaccggttttagagctacctgaaggtaaagatcgggtcctcttttttttcagccaactccaattttttttgaggacccgatctttaccttcagg

SEQ ID NO: 1310 - DNA, 104 bp, synthetic construct
  source 1..104: mol_type = other DNA
gcgccgcgacctagggttttagagctacctgaaggtaaagatcgggtcctcttttttttcagccaactccaattttttttgaggacccgatctttaccttcagg

SEQ ID NO: 1311 - DNA, 103 bp, synthetic construct
  source 1..103: mol_type = other DNA
gcgctggatggccagttttagagctacctgaaggtaaagatcgggtcctcttttttttcagccaactccaattttttttgaggacccgatctttaccttcagg

SEQ ID NO: 1312 - DNA, 103 bp, synthetic construct
  source 1..103: mol_type = other DNA
gccgctgcaatcccgttttagagctacctgaaggtaaagatcgggtcctcttttttttcagccaactccaattttttttgaggacccgatctttaccttcagg

SEQ ID NO: 1313 - DNA, 102 bp, synthetic construct
  source 1..102: mol_type = other DNA
gcggctaccgaaccggttttagagctacctggttatagcggacgcactgtttttttttcagccaactccaattttttttacagtgcgtccgctataaccagg

SEQ ID NO: 1314 - DNA, 102 bp, synthetic construct
  source 1..102: mol_type = other DNA
gcgccgcgacctagggttttagagctacctggttatagcggacgcactgtttttttttcagccaactccaattttttttacagtgcgtccgctataaccagg

SEQ ID NO: 1315 - DNA, 101 bp, synthetic construct
  source 1..101: mol_type = other DNA
gcgctggatggccagttttagagctacctggttatagcggacgcactgtttttttttcagccaactccaattttttttacagtgcgtccgctataaccagg

SEQ ID NO: 1316 - DNA, 101 bp, synthetic construct
  source 1..101: mol_type = other DNA
gccgctgcaatcccgttttagagctacctggttatagcggacgcactgtttttttttcagccaactccaattttttttacagtgcgtccgctataaccagg

SEQ ID NO: 1317 - DNA, 102 bp, synthetic construct
  source 1..102: mol_type = other DNA
gcggctaccgaaccggttttagagctaccgcatcgtattatctgcgaagcttttttttcagccaactccaattttttttgcttcgcagataatacgatgcgg

SEQ ID NO: 1318 - DNA, 102 bp, synthetic construct
  source 1..102: mol_type = other DNA
gcgccgcgacctagggttttagagctaccgcatcgtattatctgcgaagcttttttttcagccaactccaattttttttgcttcgcagataatacgatgcgg

SEQ ID NO: 1319 - DNA, 101 bp, synthetic construct
  source 1..101: mol_type = other DNA
gcgctggatggccagttttagagctaccgcatcgtattatctgcgaagcttttttttcagccaactccaattttttttgcttcgcagataatacgatgcgg

SEQ ID NO: 1320 - DNA, 101 bp, synthetic construct
  source 1..101: mol_type = other DNA
gccgctgcaatcccgttttagagctaccgcatcgtattatctgcgaagcttttttttcagccaactccaattttttttgcttcgcagataatacgatgcgg

SEQ ID NO: 1321 - DNA, 102 bp, synthetic construct
  source 1..102: mol_type = other DNA
gcggctaccgaaccggttttagagctaccgctaggacgttcaacggagtcttttttttcagccaactccaattttttttgactccgttgaacgtcctagcgg

SEQ ID NO: 1322 - DNA, 102 bp, synthetic construct
  source 1..102: mol_type = other DNA
gcgccgcgacctagggttttagagctaccgctaggacgttcaacggagtcttttttttcagccaactccaattttttttgactccgttgaacgtcctagcgg

SEQ ID NO: 1323 - DNA, 101 bp, synthetic construct
  source 1..101: mol_type = other DNA
gcgctggatggccagttttagagctaccgctaggacgttcaacggagtcttttttttcagccaactccaattttttttgactccgttgaacgtcctagcgg

SEQ ID NO: 1324 - DNA, 101 bp, synthetic construct
  source 1..101: mol_type = other DNA
gccgctgcaatcccgttttagagctaccgctaggacgttcaacggagtcttttttttcagccaactccaattttttttgactccgttgaacgtcctagcgg

SEQ ID NO: 1325 - DNA, 102 bp, synthetic construct
  source 1..102: mol_type = other DNA
gcggctaccgaaccggttttagagctaccatagcggtactatcggcatctttttttttcagccaactccaattttttttagatgccgatagtaccgctatgg

SEQ ID NO: 1326 - DNA, 102 bp, synthetic construct
  source 1..102: mol_type = other DNA
gcgccgcgacctagggttttagagctaccatagcggtactatcggcatctttttttttcagccaactccaattttttttagatgccgatagtaccgctatgg

SEQ ID NO: 1327 - DNA, 101 bp, synthetic construct
  source 1..101: mol_type = other DNA
gcgctggatggccagttttagagctaccatagcggtactatcggcatctttttttttcagccaactccaattttttttagatgccgatagtaccgctatgg

SEQ ID NO: 1328 - DNA, 101 bp, synthetic construct
  source 1..101: mol_type = other DNA
gccgctgcaatcccgttttagagctaccatagcggtactatcggcatctttttttttcagccaactccaattttttttagatgccgatagtaccgctatgg

SEQ ID NO: 1329 - DNA, 102 bp, synthetic construct
  source 1..102: mol_type = other DNA
gcggctaccgaaccggttttagagctacctcgtactagtctcgcatgaccttttttttcagccaactccaattttttttggtcatgcgagactagtacgagg

SEQ ID NO: 1330 - DNA, 102 bp, synthetic construct
  source 1..102: mol_type = other DNA
gcgccgcgacctagggttttagagctacctcgtactagtctcgcatgaccttttttttcagccaactccaattttttttggtcatgcgagactagtacgagg

SEQ ID NO: 1331 - DNA, 101 bp, synthetic construct
  source 1..101: mol_type = other DNA
gcgctggatggccagttttagagctacctcgtactagtctcgcatgaccttttttttcagccaactccaattttttttggtcatgcgagactagtacgagg

SEQ ID NO: 1332 - DNA, 101 bp, synthetic construct
  source 1..101: mol_type = other DNA
gccgctgcaatcccgttttagagctacctcgtactagtctcgcatgaccttttttttcagccaactccaattttttttggtcatgcgagactagtacgagg

SEQ ID NO: 1333 - DNA, 102 bp, synthetic construct
  source 1..102: mol_type = other DNA
gcggctaccgaaccggttttagagctaccgatagtgctaaacgacgctttttttttttcagccaactccaattttttttaaagcgtcgtttagcactatcgg

SEQ ID NO: 1334 - DNA, 102 bp, synthetic construct
  source 1..102: mol_type = other DNA
gcgccgcgacctagggttttagagctaccgatagtgctaaacgacgctttttttttttcagccaactccaattttttttaaagcgtcgtttagcactatcgg

SEQ ID NO: 1335 - DNA, 101 bp, synthetic construct
  source 1..101: mol_type = other DNA
gcgctggatggccagttttagagctaccgatagtgctaaacgacgctttttttttttcagccaactccaattttttttaaagcgtcgtttagcactatcgg

SEQ ID NO: 1336 - DNA, 101 bp, synthetic construct
  source 1..101: mol_type = other DNA
gccgctgcaatcccgttttagagctaccgatagtgctaaacgacgctttttttttttcagccaactccaattttttttaaagcgtcgtttagcactatcgg

SEQ ID NO: 1337 - DNA, 102 bp, synthetic construct
  source 1..102: mol_type = other DNA
gcggctaccgaaccggttttagagctacccgttatcgacgttcaaggaacttttttttcagccaactccaattttttttgttccttgaacgtcgataacggg

SEQ ID NO: 1338 - DNA, 102 bp, synthetic construct
  source 1..102: mol_type = other DNA
gcgccgcgacctagggttttagagctacccgttatcgacgttcaaggaacttttttttcagccaactccaattttttttgttccttgaacgtcgataacggg

SEQ ID NO: 1339 - DNA, 101 bp, synthetic construct
  source 1..101: mol_type = other DNA
gcgctggatggccagttttagagctacccgttatcgacgttcaaggaacttttttttcagccaactccaattttttttgttccttgaacgtcgataacggg

SEQ ID NO: 1340 - DNA, 101 bp, synthetic construct
  source 1..101: mol_type = other DNA
gccgctgcaatcccgttttagagctacccgttatcgacgttcaaggaacttttttttcagccaactccaattttttttgttccttgaacgtcgataacggg

SEQ ID NO: 1341 - DNA, 102 bp, synthetic construct
  source 1..102: mol_type = other DNA
gcggctaccgaaccggttttagagctaccgatcaatgcggtctgcgtaacttttttttcagccaactccaattttttttgttacgcagaccgcattgatcgg

SEQ ID NO: 1342 - DNA, 102 bp, synthetic construct
  source 1..102: mol_type = other DNA
gcgccgcgacctagggttttagagctaccgatcaatgcggtctgcgtaacttttttttcagccaactccaattttttttgttacgcagaccgcattgatcgg

SEQ ID NO: 1343 - DNA, 101 bp, synthetic construct
  source 1..101: mol_type = other DNA
gcgctggatggccagttttagagctaccgatcaatgcggtctgcgtaacttttttttcagccaactccaattttttttgttacgcagaccgcattgatcgg

SEQ ID NO: 1344 - DNA, 101 bp, synthetic construct
  source 1..101: mol_type = other DNA
gccgctgcaatcccgttttagagctaccgatcaatgcggtctgcgtaacttttttttcagccaactccaattttttttgttacgcagaccgcattgatcgg

SEQ ID NO: 1345 - DNA, 102 bp, synthetic construct
  source 1..102: mol_type = other DNA
gcggctaccgaaccggttttagagctacccttactcgcgatactctcgacttttttttcagccaactccaattttttttgtcgagagtatcgcgagtaaggg

SEQ ID NO: 1346 - DNA, 102 bp, synthetic construct
  source 1..102: mol_type = other DNA
gcgccgcgacctagggttttagagctacccttactcgcgatactctcgacttttttttcagccaactccaattttttttgtcgagagtatcgcgagtaaggg

SEQ ID NO: 1347 - DNA, 101 bp, synthetic construct
  source 1..101: mol_type = other DNA
gcgctggatggccagttttagagctacccttactcgcgatactctcgacttttttttcagccaactccaattttttttgtcgagagtatcgcgagtaaggg

SEQ ID NO: 1348 - DNA, 101 bp, synthetic construct
  source 1..101: mol_type = other DNA
gccgctgcaatcccgttttagagctacccttactcgcgatactctcgacttttttttcagccaactccaattttttttgtcgagagtatcgcgagtaaggg

SEQ ID NO: 1349 - DNA, 102 bp, synthetic construct
  source 1..102: mol_type = other DNA
gcggctaccgaaccggttttagagctaccgcggacggtaagcacggaatattttttttcagccaactccaatttttttttattccgtgcttaccgtccgcgg

SEQ ID NO: 1350 - DNA, 102 bp, synthetic construct
  source 1..102: mol_type = other DNA
gcgccgcgacctagggttttagagctaccgcggacggtaagcacggaatattttttttcagccaactccaatttttttttattccgtgcttaccgtccgcgg

SEQ ID NO: 1351 - DNA, 101 bp, synthetic construct
  source 1..101: mol_type = other DNA
gcgctggatggccagttttagagctaccgcggacggtaagcacggaatattttttttcagccaactccaatttttttttattccgtgcttaccgtccgcgg

SEQ ID NO: 1352 - DNA, 101 bp, synthetic construct
  source 1..101: mol_type = other DNA
gccgctgcaatcccgttttagagctaccgcggacggtaagcacggaatattttttttcagccaactccaatttttttttattccgtgcttaccgtccgcgg

SEQ ID NO: 1353 - DNA, 102 bp, synthetic construct
  source 1..102: mol_type = other DNA
gcggctaccgaaccggttttagagctacctatagtcacgaatcgtagggtttttttttcagccaactccaattttttttaccctacgattcgtgactatagg

SEQ ID NO: 1354 - DNA, 102 bp, synthetic construct
  source 1..102: mol_type = other DNA
gcgccgcgacctagggttttagagctacctatagtcacgaatcgtagggtttttttttcagccaactccaattttttttaccctacgattcgtgactatagg

SEQ ID NO: 1355 - DNA, 101 bp, synthetic construct
  source 1..101: mol_type = other DNA
gcgctggatggccagttttagagctacctatagtcacgaatcgtagggtttttttttcagccaactccaattttttttaccctacgattcgtgactatagg

SEQ ID NO: 1356 - DNA, 101 bp, synthetic construct
  source 1..101: mol_type = other DNA
gccgctgcaatcccgttttagagctacctatagtcacgaatcgtagggtttttttttcagccaactccaattttttttaccctacgattcgtgactatagg

SEQ ID NO: 1357 - DNA, 102 bp, synthetic construct
  source 1..102: mol_type = other DNA
gcggctaccgaaccggttttagagctacccgtcgtcacgtatgcgtagcattttttttcagccaactccaatttttttttgctacgcatacgtgacgacggg

SEQ ID NO: 1358 - DNA, 102 bp, synthetic construct
  source 1..102: mol_type = other DNA
gcgccgcgacctagggttttagagctacccgtcgtcacgtatgcgtagcattttttttcagccaactccaatttttttttgctacgcatacgtgacgacggg

SEQ ID NO: 1359 - DNA, 101 bp, synthetic construct
  source 1..101: mol_type = other DNA
gcgctggatggccagttttagagctacccgtcgtcacgtatgcgtagcattttttttcagccaactccaatttttttttgctacgcatacgtgacgacggg

SEQ ID NO: 1360 - DNA, 101 bp, synthetic construct
  source 1..101: mol_type = other DNA
gccgctgcaatcccgttttagagctacccgtcgtcacgtatgcgtagcattttttttcagccaactccaatttttttttgctacgcatacgtgacgacggg

SEQ ID NO: 1361 - DNA, 102 bp, synthetic construct
  source 1..102: mol_type = other DNA
gcggctaccgaaccggttttagagctacccgagaggtagtagacgacgcattttttttcagccaactccaatttttttttgcgtcgtctactacctctcggg

SEQ ID NO: 1362 - DNA, 102 bp, synthetic construct
  source 1..102: mol_type = other DNA
gcgccgcgacctagggttttagagctacccgagaggtagtagacgacgcattttttttcagccaactccaatttttttttgcgtcgtctactacctctcggg

SEQ ID NO: 1363 - DNA, 101 bp, synthetic construct
  source 1..101: mol_type = other DNA
gcgctggatggccagttttagagctacccgagaggtagtagacgacgcattttttttcagccaactccaatttttttttgcgtcgtctactacctctcggg

SEQ ID NO: 1364 - DNA, 101 bp, synthetic construct
  source 1..101: mol_type = other DNA
gccgctgcaatcccgttttagagctacccgagaggtagtagacgacgcattttttttcagccaactccaatttttttttgcgtcgtctactacctctcggg

SEQ ID NO: 1365 - DNA, 102 bp, synthetic construct
  source 1..102: mol_type = other DNA
gcggctaccgaaccggttttagagctaccgacgtctacggacgggagctattttttttcagccaactccaatttttttttagctcccgtccgtagacgtcgg

SEQ ID NO: 1366 - DNA, 102 bp, synthetic construct
  source 1..102: mol_type = other DNA
gcgccgcgacctagggttttagagctaccgacgtctacggacgggagctattttttttcagccaactccaatttttttttagctcccgtccgtagacgtcgg

SEQ ID NO: 1367 - DNA, 101 bp, synthetic construct
  source 1..101: mol_type = other DNA
gcgctggatggccagttttagagctaccgacgtctacggacgggagctattttttttcagccaactccaatttttttttagctcccgtccgtagacgtcgg

SEQ ID NO: 1368 - DNA, 101 bp, synthetic construct
  source 1..101: mol_type = other DNA
gccgctgcaatcccgttttagagctaccgacgtctacggacgggagctattttttttcagccaactccaatttttttttagctcccgtccgtagacgtcgg

SEQ ID NO: 1369 - DNA, 102 bp, synthetic construct
  source 1..102: mol_type = other DNA
gcggctaccgaaccggttttagagctaccaaagctcattcgcgactgagcttttttttcagccaactccaattttttttgctcagtcgcgaatgagctttgg

SEQ ID NO: 1370 - DNA, 102 bp, synthetic construct
  source 1..102: mol_type = other DNA
gcgccgcgacctagggttttagagctaccaaagctcattcgcgactgagcttttttttcagccaactccaattttttttgctcagtcgcgaatgagctttgg

SEQ ID NO: 1371 - DNA, 101 bp, synthetic construct
  source 1..101: mol_type = other DNA
gcgctggatggccagttttagagctaccaaagctcattcgcgactgagcttttttttcagccaactccaattttttttgctcagtcgcgaatgagctttgg

SEQ ID NO: 1372 - DNA, 101 bp, synthetic construct
  source 1..101: mol_type = other DNA
gccgctgcaatcccgttttagagctaccaaagctcattcgcgactgagcttttttttcagccaactccaattttttttgctcagtcgcgaatgagctttgg

SEQ ID NO: 1373 - DNA, 102 bp, synthetic construct
  source 1..102: mol_type = other DNA
gcggctaccgaaccggttttagagctaccatggcacgatcgacacggaggttttttttcagccaactccaattttttttcctccgtgtcgatcgtgccatgg

SEQ ID NO: 1374 - DNA, 102 bp, synthetic construct
  source 1..102: mol_type = other DNA
gcgccgcgacctagggttttagagctaccatggcacgatcgacacggaggttttttttcagccaactccaattttttttcctccgtgtcgatcgtgccatgg

SEQ ID NO: 1375 - DNA, 101 bp, synthetic construct
  source 1..101: mol_type = other DNA
gcgctggatggccagttttagagctaccatggcacgatcgacacggaggttttttttcagccaactccaattttttttcctccgtgtcgatcgtgccatgg

SEQ ID NO: 1376 - DNA, 101 bp, synthetic construct
  source 1..101: mol_type = other DNA
gccgctgcaatcccgttttagagctaccatggcacgatcgacacggaggttttttttcagccaactccaattttttttcctccgtgtcgatcgtgccatgg

SEQ ID NO: 1377 - DNA, 102 bp, synthetic construct
  source 1..102: mol_type = other DNA
gcggctaccgaaccggttttagagctacccgaactctctatcgaacgagtttttttttcagccaactccaattttttttactcgttcgatagagagttcggg

SEQ ID NO: 1378 - DNA, 102 bp, synthetic construct
  source 1..102: mol_type = other DNA
gcgccgcgacctagggttttagagctacccgaactctctatcgaacgagtttttttttcagccaactccaattttttttactcgttcgatagagagttcggg

SEQ ID NO: 1379 - DNA, 101 bp, synthetic construct
  source 1..101: mol_type = other DNA
gcgctggatggccagttttagagctacccgaactctctatcgaacgagtttttttttcagccaactccaattttttttactcgttcgatagagagttcggg

SEQ ID NO: 1380 - DNA, 101 bp, synthetic construct
  source 1..101: mol_type = other DNA
gccgctgcaatcccgttttagagctacccgaactctctatcgaacgagtttttttttcagccaactccaattttttttactcgttcgatagagagttcggg

SEQ ID NO: 1381 - DNA, 104 bp, synthetic construct
  source 1..104: mol_type = other DNA
gctggccgcactaaggttttagagctaccgtcgttgtaccgtctacttgacttttttttcagccaactccaattttttttgtcaagtagacggtacaacgacgg

SEQ ID NO: 1382 - DNA, 103 bp, synthetic construct
  source 1..103: mol_type = other DNA
gtgctccccaaaatgttttagagctaccgtcgttgtaccgtctacttgacttttttttcagccaactccaattttttttgtcaagtagacggtacaacgacgg

SEQ ID NO: 1383 - DNA, 103 bp, synthetic construct
  source 1..103: mol_type = other DNA
gcactgatctcagagttttagagctaccgtcgttgtaccgtctacttgacttttttttcagccaactccaattttttttgtcaagtagacggtacaacgacgg

SEQ ID NO: 1384 - DNA, 104 bp, synthetic construct
  source 1..104: mol_type = other DNA
gcacgtggggccccggttttagagctaccgtcgttgtaccgtctacttgacttttttttcagccaactccaattttttttgtcaagtagacggtacaacgacgg

SEQ ID NO: 1385 - DNA, 102 bp, synthetic construct
  source 1..102: mol_type = other DNA
gctggccgcactaaggttttagagctacctacactcgacatcggtagctattttttttcagccaactccaatttttttttagctaccgatgtcgagtgtagg

SEQ ID NO: 1386 - DNA, 101 bp, synthetic construct
  source 1..101: mol_type = other DNA
gtgctccccaaaatgttttagagctacctacactcgacatcggtagctattttttttcagccaactccaatttttttttagctaccgatgtcgagtgtagg

SEQ ID NO: 1387 - DNA, 101 bp, synthetic construct
  source 1..101: mol_type = other DNA
gcactgatctcagagttttagagctacctacactcgacatcggtagctattttttttcagccaactccaatttttttttagctaccgatgtcgagtgtagg

SEQ ID NO: 1388 - DNA, 102 bp, synthetic construct
  source 1..102: mol_type = other DNA
gcacgtggggccccggttttagagctacctacactcgacatcggtagctattttttttcagccaactccaatttttttttagctaccgatgtcgagtgtagg

SEQ ID NO: 1389 - DNA, 102 bp, synthetic construct
  source 1..102: mol_type = other DNA
gctggccgcactaaggttttagagctaccctggcggaacgttcgagtaatttttttttcagccaactccaattttttttattactcgaacgttccgccaggg

SEQ ID NO: 1390 - DNA, 101 bp, synthetic construct
  source 1..101: mol_type = other DNA
gtgctccccaaaatgttttagagctaccctggcggaacgttcgagtaatttttttttcagccaactccaattttttttattactcgaacgttccgccaggg

SEQ ID NO: 1391 - DNA, 101 bp, synthetic construct
  source 1..101: mol_type = other DNA
gcactgatctcagagttttagagctaccctggcggaacgttcgagtaatttttttttcagccaactccaattttttttattactcgaacgttccgccaggg

SEQ ID NO: 1392 - DNA, 102 bp, synthetic construct
  source 1..102: mol_type = other DNA
gcacgtggggccccggttttagagctaccctggcggaacgttcgagtaatttttttttcagccaactccaattttttttattactcgaacgttccgccaggg

SEQ ID NO: 1393 - DNA, 102 bp, synthetic construct
  source 1..102: mol_type = other DNA
gctggccgcactaaggttttagagctacctacacgatagtggtcgtgcgcttttttttcagccaactccaattttttttgcgcacgaccactatcgtgtagg

SEQ ID NO: 1394 - DNA, 101 bp, synthetic construct
  source 1..101: mol_type = other DNA
gtgctccccaaaatgttttagagctacctacacgatagtggtcgtgcgcttttttttcagccaactccaattttttttgcgcacgaccactatcgtgtagg

SEQ ID NO: 1395 - DNA, 101 bp, synthetic construct
  source 1..101: mol_type = other DNA
gcactgatctcagagttttagagctacctacacgatagtggtcgtgcgcttttttttcagccaactccaattttttttgcgcacgaccactatcgtgtagg

SEQ ID NO: 1396 - DNA, 102 bp, synthetic construct
  source 1..102: mol_type = other DNA
gcacgtggggccccggttttagagctacctacacgatagtggtcgtgcgcttttttttcagccaactccaattttttttgcgcacgaccactatcgtgtagg

SEQ ID NO: 1397 - DNA, 104 bp, synthetic construct
  source 1..104: mol_type = other DNA
gctggccgcactaaggttttagagctaccttcccgacttccgtaggagcgcttttttttcagccaactccaattttttttgcgctcctacggaagtcgggaagg

SEQ ID NO: 1398 - DNA, 103 bp, synthetic construct
  source 1..103: mol_type = other DNA
gtgctccccaaaatgttttagagctaccttcccgacttccgtaggagcgcttttttttcagccaactccaattttttttgcgctcctacggaagtcgggaagg

SEQ ID NO: 1399 - DNA, 103 bp, synthetic construct
  source 1..103: mol_type = other DNA
gcactgatctcagagttttagagctaccttcccgacttccgtaggagcgcttttttttcagccaactccaattttttttgcgctcctacggaagtcgggaagg

SEQ ID NO: 1400 - DNA, 104 bp, synthetic construct
  source 1..104: mol_type = other DNA
gcacgtggggccccggttttagagctaccttcccgacttccgtaggagcgcttttttttcagccaactccaattttttttgcgctcctacggaagtcgggaagg

SEQ ID NO: 1401 - DNA, 104 bp, synthetic construct
  source 1..104: mol_type = other DNA
gctggccgcactaaggttttagagctacctgaaggtaaagatcgggtcctcttttttttcagccaactccaattttttttgaggacccgatctttaccttcagg

SEQ ID NO: 1402 - DNA, 103 bp, synthetic construct
  source 1..103: mol_type = other DNA
gtgctccccaaaatgttttagagctacctgaaggtaaagatcgggtcctcttttttttcagccaactccaattttttttgaggacccgatctttaccttcagg

SEQ ID NO: 1403 - DNA, 103 bp, synthetic construct
  source 1..103: mol_type = other DNA
gcactgatctcagagttttagagctacctgaaggtaaagatcgggtcctcttttttttcagccaactccaattttttttgaggacccgatctttaccttcagg

SEQ ID NO: 1404 - DNA, 104 bp, synthetic construct
  source 1..104: mol_type = other DNA
gcacgtggggccccggttttagagctacctgaaggtaaagatcgggtcctcttttttttcagccaactccaattttttttgaggacccgatctttaccttcagg

SEQ ID NO: 1405 - DNA, 102 bp, synthetic construct
  source 1..102: mol_type = other DNA
gctggccgcactaaggttttagagctacctggttatagcggacgcactgtttttttttcagccaactccaattttttttacagtgcgtccgctataaccagg

SEQ ID NO: 1406 - DNA, 101 bp, synthetic construct
  source 1..101: mol_type = other DNA
gtgctccccaaaatgttttagagctacctggttatagcggacgcactgtttttttttcagccaactccaattttttttacagtgcgtccgctataaccagg

SEQ ID NO: 1407 - DNA, 101 bp, synthetic construct
  source 1..101: mol_type = other DNA
gcactgatctcagagttttagagctacctggttatagcggacgcactgtttttttttcagccaactccaattttttttacagtgcgtccgctataaccagg

SEQ ID NO: 1408 - DNA, 102 bp, synthetic construct
  source 1..102: mol_type = other DNA
gcacgtggggccccggttttagagctacctggttatagcggacgcactgtttttttttcagccaactccaattttttttacagtgcgtccgctataaccagg

SEQ ID NO: 1409 - DNA, 102 bp, synthetic construct
  source 1..102: mol_type = other DNA
gctggccgcactaaggttttagagctaccgcatcgtattatctgcgaagcttttttttcagccaactccaattttttttgcttcgcagataatacgatgcgg

SEQ ID NO: 1410 - DNA, 101 bp, synthetic construct
  source 1..101: mol_type = other DNA
gtgctccccaaaatgttttagagctaccgcatcgtattatctgcgaagcttttttttcagccaactccaattttttttgcttcgcagataatacgatgcgg

SEQ ID NO: 1411 - DNA, 101 bp, synthetic construct
  source 1..101: mol_type = other DNA
gcactgatctcagagttttagagctaccgcatcgtattatctgcgaagcttttttttcagccaactccaattttttttgcttcgcagataatacgatgcgg

SEQ ID NO: 1412 - DNA, 102 bp, synthetic construct
  source 1..102: mol_type = other DNA
gcacgtggggccccggttttagagctaccgcatcgtattatctgcgaagcttttttttcagccaactccaattttttttgcttcgcagataatacgatgcgg

SEQ ID NO: 1413 - DNA, 102 bp, synthetic construct
  source 1..102: mol_type = other DNA
gctggccgcactaaggttttagagctaccgctaggacgttcaacggagtcttttttttcagccaactccaattttttttgactccgttgaacgtcctagcgg

SEQ ID NO: 1414 - DNA, 101 bp, synthetic construct
  source 1..101: mol_type = other DNA
gtgctccccaaaatgttttagagctaccgctaggacgttcaacggagtcttttttttcagccaactccaattttttttgactccgttgaacgtcctagcgg

SEQ ID NO: 1415 - DNA, 101 bp, synthetic construct
  source 1..101: mol_type = other DNA
gcactgatctcagagttttagagctaccgctaggacgttcaacggagtcttttttttcagccaactccaattttttttgactccgttgaacgtcctagcgg

SEQ ID NO: 1416 - DNA, 102 bp, synthetic construct
  source 1..102: mol_type = other DNA
gcacgtggggccccggttttagagctaccgctaggacgttcaacggagtcttttttttcagccaactccaattttttttgactccgttgaacgtcctagcgg

SEQ ID NO: 1417 - DNA, 102 bp, synthetic construct
  source 1..102: mol_type = other DNA
gctggccgcactaaggttttagagctaccatagcggtactatcggcatctttttttttcagccaactccaattttttttagatgccgatagtaccgctatgg

SEQ ID NO: 1418 - DNA, 101 bp, synthetic construct
  source 1..101: mol_type = other DNA
gtgctccccaaaatgttttagagctaccatagcggtactatcggcatctttttttttcagccaactccaattttttttagatgccgatagtaccgctatgg

SEQ ID NO: 1419 - DNA, 101 bp, synthetic construct
  source 1..101: mol_type = other DNA
gcactgatctcagagttttagagctaccatagcggtactatcggcatctttttttttcagccaactccaattttttttagatgccgatagtaccgctatgg

SEQ ID NO: 1420 - DNA, 102 bp, synthetic construct
  source 1..102: mol_type = other DNA
gcacgtggggccccggttttagagctaccatagcggtactatcggcatctttttttttcagccaactccaattttttttagatgccgatagtaccgctatgg

SEQ ID NO: 1421 - DNA, 102 bp, synthetic construct
  source 1..102: mol_type = other DNA
gctggccgcactaaggttttagagctacctcgtactagtctcgcatgaccttttttttcagccaactccaattttttttggtcatgcgagactagtacgagg

SEQ ID NO: 1422 - DNA, 101 bp, synthetic construct
  source 1..101: mol_type = other DNA
gtgctccccaaaatgttttagagctacctcgtactagtctcgcatgaccttttttttcagccaactccaattttttttggtcatgcgagactagtacgagg

SEQ ID NO: 1423 - DNA, 101 bp, synthetic construct
  source 1..101: mol_type = other DNA
gcactgatctcagagttttagagctacctcgtactagtctcgcatgaccttttttttcagccaactccaattttttttggtcatgcgagactagtacgagg

SEQ ID NO: 1424 - DNA, 102 bp, synthetic construct
  source 1..102: mol_type = other DNA
gcacgtggggccccggttttagagctacctcgtactagtctcgcatgaccttttttttcagccaactccaattttttttggtcatgcgagactagtacgagg

SEQ ID NO: 1425 - DNA, 102 bp, synthetic construct
  source 1..102: mol_type = other DNA
gctggccgcactaaggttttagagctaccgatagtgctaaacgacgctttttttttttcagccaactccaattttttttaaagcgtcgtttagcactatcgg

SEQ ID NO: 1426 - DNA, 101 bp, synthetic construct
  source 1..101: mol_type = other DNA
gtgctccccaaaatgttttagagctaccgatagtgctaaacgacgctttttttttttcagccaactccaattttttttaaagcgtcgtttagcactatcgg

SEQ ID NO: 1427 - DNA, 101 bp, synthetic construct
  source 1..101: mol_type = other DNA
gcactgatctcagagttttagagctaccgatagtgctaaacgacgctttttttttttcagccaactccaattttttttaaagcgtcgtttagcactatcgg

SEQ ID NO: 1428 - DNA, 102 bp, synthetic construct
  source 1..102: mol_type = other DNA
gcacgtggggccccggttttagagctaccgatagtgctaaacgacgctttttttttttcagccaactccaattttttttaaagcgtcgtttagcactatcgg

SEQ ID NO: 1429 - DNA, 102 bp, synthetic construct
  source 1..102: mol_type = other DNA
gctggccgcactaaggttttagagctacccgttatcgacgttcaaggaacttttttttcagccaactccaattttttttgttccttgaacgtcgataacggg

SEQ ID NO: 1430 - DNA, 101 bp, synthetic construct
  source 1..101: mol_type = other DNA
gtgctccccaaaatgttttagagctacccgttatcgacgttcaaggaacttttttttcagccaactccaattttttttgttccttgaacgtcgataacggg

SEQ ID NO: 1431 - DNA, 101 bp, synthetic construct
  source 1..101: mol_type = other DNA
gcactgatctcagagttttagagctacccgttatcgacgttcaaggaacttttttttcagccaactccaattttttttgttccttgaacgtcgataacggg

SEQ ID NO: 1432 - DNA, 102 bp, synthetic construct
  source 1..102: mol_type = other DNA
gcacgtggggccccggttttagagctacccgttatcgacgttcaaggaacttttttttcagccaactccaattttttttgttccttgaacgtcgataacggg

SEQ ID NO: 1433 - DNA, 102 bp, synthetic construct
  source 1..102: mol_type = other DNA
gctggccgcactaaggttttagagctaccgatcaatgcggtctgcgtaacttttttttcagccaactccaattttttttgttacgcagaccgcattgatcgg

SEQ ID NO: 1434 - DNA, 101 bp, synthetic construct
  source 1..101: mol_type = other DNA
gtgctccccaaaatgttttagagctaccgatcaatgcggtctgcgtaacttttttttcagccaactccaattttttttgttacgcagaccgcattgatcgg

SEQ ID NO: 1435 - DNA, 101 bp, synthetic construct
  source 1..101: mol_type = other DNA
gcactgatctcagagttttagagctaccgatcaatgcggtctgcgtaacttttttttcagccaactccaattttttttgttacgcagaccgcattgatcgg

SEQ ID NO: 1436 - DNA, 102 bp, synthetic construct
  source 1..102: mol_type = other DNA
gcacgtggggccccggttttagagctaccgatcaatgcggtctgcgtaacttttttttcagccaactccaattttttttgttacgcagaccgcattgatcgg

SEQ ID NO: 1437 - DNA, 102 bp, synthetic construct
  source 1..102: mol_type = other DNA
gctggccgcactaaggttttagagctacccttactcgcgatactctcgacttttttttcagccaactccaattttttttgtcgagagtatcgcgagtaaggg

SEQ ID NO: 1438 - DNA, 101 bp, synthetic construct
  source 1..101: mol_type = other DNA
gtgctccccaaaatgttttagagctacccttactcgcgatactctcgacttttttttcagccaactccaattttttttgtcgagagtatcgcgagtaaggg

SEQ ID NO: 1439 - DNA, 101 bp, synthetic construct
  source 1..101: mol_type = other DNA
gcactgatctcagagttttagagctacccttactcgcgatactctcgacttttttttcagccaactccaattttttttgtcgagagtatcgcgagtaaggg

SEQ ID NO: 1440 - DNA, 102 bp, synthetic construct
  source 1..102: mol_type = other DNA
gcacgtggggccccggttttagagctacccttactcgcgatactctcgacttttttttcagccaactccaattttttttgtcgagagtatcgcgagtaaggg

SEQ ID NO: 1441 - DNA, 102 bp, synthetic construct
  source 1..102: mol_type = other DNA
gctggccgcactaaggttttagagctaccgcggacggtaagcacggaatattttttttcagccaactccaatttttttttattccgtgcttaccgtccgcgg

SEQ ID NO: 1442 - DNA, 101 bp, synthetic construct
  source 1..101: mol_type = other DNA
gtgctccccaaaatgttttagagctaccgcggacggtaagcacggaatattttttttcagccaactccaatttttttttattccgtgcttaccgtccgcgg

SEQ ID NO: 1443 - DNA, 101 bp, synthetic construct
  source 1..101: mol_type = other DNA
gcactgatctcagagttttagagctaccgcggacggtaagcacggaatattttttttcagccaactccaatttttttttattccgtgcttaccgtccgcgg

SEQ ID NO: 1444 - DNA, 102 bp, synthetic construct
  source 1..102: mol_type = other DNA
gcacgtggggccccggttttagagctaccgcggacggtaagcacggaatattttttttcagccaactccaatttttttttattccgtgcttaccgtccgcgg

SEQ ID NO: 1445 - DNA, 102 bp, synthetic construct
  source 1..102: mol_type = other DNA
gctggccgcactaaggttttagagctacctatagtcacgaatcgtagggtttttttttcagccaactccaattttttttaccctacgattcgtgactatagg

SEQ ID NO: 1446 - DNA, 101 bp, synthetic construct
  source 1..101: mol_type = other DNA
gtgctccccaaaatgttttagagctacctatagtcacgaatcgtagggtttttttttcagccaactccaattttttttaccctacgattcgtgactatagg

SEQ ID NO: 1447 - DNA, 101 bp, synthetic construct
  source 1..101: mol_type = other DNA
gcactgatctcagagttttagagctacctatagtcacgaatcgtagggtttttttttcagccaactccaattttttttaccctacgattcgtgactatagg

SEQ ID NO: 1448 - DNA, 102 bp, synthetic construct
  source 1..102: mol_type = other DNA
gcacgtggggccccggttttagagctacctatagtcacgaatcgtagggtttttttttcagccaactccaattttttttaccctacgattcgtgactatagg

SEQ ID NO: 1449 - DNA, 102 bp, synthetic construct
  source 1..102: mol_type = other DNA
gctggccgcactaaggttttagagctacccgtcgtcacgtatgcgtagcattttttttcagccaactccaatttttttttgctacgcatacgtgacgacggg

SEQ ID NO: 1450 - DNA, 101 bp, synthetic construct
  source 1..101: mol_type = other DNA
gtgctccccaaaatgttttagagctacccgtcgtcacgtatgcgtagcattttttttcagccaactccaatttttttttgctacgcatacgtgacgacggg

SEQ ID NO: 1451 - DNA, 101 bp, synthetic construct
  source 1..101: mol_type = other DNA
gcactgatctcagagttttagagctacccgtcgtcacgtatgcgtagcattttttttcagccaactccaatttttttttgctacgcatacgtgacgacggg

SEQ ID NO: 1452 - DNA, 102 bp, synthetic construct
  source 1..102: mol_type = other DNA
gcacgtggggccccggttttagagctacccgtcgtcacgtatgcgtagcattttttttcagccaactccaatttttttttgctacgcatacgtgacgacggg

SEQ ID NO: 1453 - DNA, 102 bp, synthetic construct
  source 1..102: mol_type = other DNA
gctggccgcactaaggttttagagctacccgagaggtagtagacgacgcattttttttcagccaactccaatttttttttgcgtcgtctactacctctcggg

SEQ ID NO: 1454 - DNA, 101 bp, synthetic construct
  source 1..101: mol_type = other DNA
gtgctccccaaaatgttttagagctacccgagaggtagtagacgacgcattttttttcagccaactccaatttttttttgcgtcgtctactacctctcggg

SEQ ID NO: 1455 - DNA, 101 bp, synthetic construct
  source 1..101: mol_type = other DNA
gcactgatctcagagttttagagctacccgagaggtagtagacgacgcattttttttcagccaactccaatttttttttgcgtcgtctactacctctcggg

SEQ ID NO: 1456 - DNA, 102 bp, synthetic construct
  source 1..102: mol_type = other DNA
gcacgtggggccccggttttagagctacccgagaggtagtagacgacgcattttttttcagccaactccaatttttttttgcgtcgtctactacctctcggg

SEQ ID NO: 1457 - DNA, 102 bp, synthetic construct
  source 1..102: mol_type = other DNA
gctggccgcactaaggttttagagctaccgacgtctacggacgggagctattttttttcagccaactccaatttttttttagctcccgtccgtagacgtcgg

SEQ ID NO: 1458 - DNA, 101 bp, synthetic construct
  source 1..101: mol_type = other DNA
gtgctccccaaaatgttttagagctaccgacgtctacggacgggagctattttttttcagccaactccaatttttttttagctcccgtccgtagacgtcgg

SEQ ID NO: 1459 - DNA, 101 bp, synthetic construct
  source 1..101: mol_type = other DNA
gcactgatctcagagttttagagctaccgacgtctacggacgggagctattttttttcagccaactccaatttttttttagctcccgtccgtagacgtcgg

SEQ ID NO: 1460 - DNA, 102 bp, synthetic construct
  source 1..102: mol_type = other DNA
gcacgtggggccccggttttagagctaccgacgtctacggacgggagctattttttttcagccaactccaatttttttttagctcccgtccgtagacgtcgg

SEQ ID NO: 1461 - DNA, 102 bp, synthetic construct
  source 1..102: mol_type = other DNA
gctggccgcactaaggttttagagctaccaaagctcattcgcgactgagcttttttttcagccaactccaattttttttgctcagtcgcgaatgagctttgg

SEQ ID NO: 1462 - DNA, 101 bp, synthetic construct
  source 1..101: mol_type = other DNA
gtgctccccaaaatgttttagagctaccaaagctcattcgcgactgagcttttttttcagccaactccaattttttttgctcagtcgcgaatgagctttgg

SEQ ID NO: 1463 - DNA, 101 bp, synthetic construct
  source 1..101: mol_type = other DNA
gcactgatctcagagttttagagctaccaaagctcattcgcgactgagcttttttttcagccaactccaattttttttgctcagtcgcgaatgagctttgg

SEQ ID NO: 1464 - DNA, 102 bp, synthetic construct
  source 1..102: mol_type = other DNA
gcacgtggggccccggttttagagctaccaaagctcattcgcgactgagcttttttttcagccaactccaattttttttgctcagtcgcgaatgagctttgg

SEQ ID NO: 1465 - DNA, 102 bp, synthetic construct
  source 1..102: mol_type = other DNA
gctggccgcactaaggttttagagctaccatggcacgatcgacacggaggttttttttcagccaactccaattttttttcctccgtgtcgatcgtgccatgg

SEQ ID NO: 1466 - DNA, 101 bp, synthetic construct
  source 1..101: mol_type = other DNA
gtgctccccaaaatgttttagagctaccatggcacgatcgacacggaggttttttttcagccaactccaattttttttcctccgtgtcgatcgtgccatgg

SEQ ID NO: 1467 - DNA, 101 bp, synthetic construct
  source 1..101: mol_type = other DNA
gcactgatctcagagttttagagctaccatggcacgatcgacacggaggttttttttcagccaactccaattttttttcctccgtgtcgatcgtgccatgg

SEQ ID NO: 1468 - DNA, 102 bp, synthetic construct
  source 1..102: mol_type = other DNA
gcacgtggggccccggttttagagctaccatggcacgatcgacacggaggttttttttcagccaactccaattttttttcctccgtgtcgatcgtgccatgg

SEQ ID NO: 1469 - DNA, 102 bp, synthetic construct
  source 1..102: mol_type = other DNA
gctggccgcactaaggttttagagctacccgaactctctatcgaacgagtttttttttcagccaactccaattttttttactcgttcgatagagagttcggg

SEQ ID NO: 1470 - DNA, 101 bp, synthetic construct
  source 1..101: mol_type = other DNA
gtgctccccaaaatgttttagagctacccgaactctctatcgaacgagtttttttttcagccaactccaattttttttactcgttcgatagagagttcggg

SEQ ID NO: 1471 - DNA, 101 bp, synthetic construct
  source 1..101: mol_type = other DNA
gcactgatctcagagttttagagctacccgaactctctatcgaacgagtttttttttcagccaactccaattttttttactcgttcgatagagagttcggg

SEQ ID NO: 1472 - DNA, 102 bp, synthetic construct
  source 1..102: mol_type = other DNA
gcacgtggggccccggttttagagctacccgaactctctatcgaacgagtttttttttcagccaactccaattttttttactcgttcgatagagagttcggg

SEQ ID NO: 1473 - DNA, 104 bp, synthetic construct
  source 1..104: mol_type = other DNA
gctggcacgcgcctagttttagagctaccgtcgttgtaccgtctacttgacttttttttcagccaactccaattttttttgtcaagtagacggtacaacgacgg

SEQ ID NO: 1474 - DNA, 103 bp, synthetic construct
  source 1..103: mol_type = other DNA
gcgcgggtacgcaggttttagagctaccgtcgttgtaccgtctacttgacttttttttcagccaactccaattttttttgtcaagtagacggtacaacgacgg

SEQ ID NO: 1475 - DNA, 104 bp, synthetic construct
  source 1..104: mol_type = other DNA
gtgccggcggcgagggttttagagctaccgtcgttgtaccgtctacttgacttttttttcagccaactccaattttttttgtcaagtagacggtacaacgacgg

SEQ ID NO: 1476 - DNA, 104 bp, synthetic construct
  source 1..104: mol_type = other DNA
gcaggagctcccaaagttttagagctaccgtcgttgtaccgtctacttgacttttttttcagccaactccaattttttttgtcaagtagacggtacaacgacgg

SEQ ID NO: 1477 - DNA, 102 bp, synthetic construct
  source 1..102: mol_type = other DNA
gctggcacgcgcctagttttagagctacctacactcgacatcggtagctattttttttcagccaactccaatttttttttagctaccgatgtcgagtgtagg

SEQ ID NO: 1478 - DNA, 101 bp, synthetic construct
  source 1..101: mol_type = other DNA
gcgcgggtacgcaggttttagagctacctacactcgacatcggtagctattttttttcagccaactccaatttttttttagctaccgatgtcgagtgtagg

SEQ ID NO: 1479 - DNA, 102 bp, synthetic construct
  source 1..102: mol_type = other DNA
gtgccggcggcgagggttttagagctacctacactcgacatcggtagctattttttttcagccaactccaatttttttttagctaccgatgtcgagtgtagg

SEQ ID NO: 1480 - DNA, 102 bp, synthetic construct
  source 1..102: mol_type = other DNA
gcaggagctcccaaagttttagagctacctacactcgacatcggtagctattttttttcagccaactccaatttttttttagctaccgatgtcgagtgtagg

SEQ ID NO: 1481 - DNA, 102 bp, synthetic construct
  source 1..102: mol_type = other DNA
gctggcacgcgcctagttttagagctaccctggcggaacgttcgagtaatttttttttcagccaactccaattttttttattactcgaacgttccgccaggg

SEQ ID NO: 1482 - DNA, 101 bp, synthetic construct
  source 1..101: mol_type = other DNA
gcgcgggtacgcaggttttagagctaccctggcggaacgttcgagtaatttttttttcagccaactccaattttttttattactcgaacgttccgccaggg

SEQ ID NO: 1483 - DNA, 102 bp, synthetic construct
  source 1..102: mol_type = other DNA
gtgccggcggcgagggttttagagctaccctggcggaacgttcgagtaatttttttttcagccaactccaattttttttattactcgaacgttccgccaggg

SEQ ID NO: 1484 - DNA, 102 bp, synthetic construct
  source 1..102: mol_type = other DNA
gcaggagctcccaaagttttagagctaccctggcggaacgttcgagtaatttttttttcagccaactccaattttttttattactcgaacgttccgccaggg

SEQ ID NO: 1485 - DNA, 102 bp, synthetic construct
  source 1..102: mol_type = other DNA
gctggcacgcgcctagttttagagctacctacacgatagtggtcgtgcgcttttttttcagccaactccaattttttttgcgcacgaccactatcgtgtagg

SEQ ID NO: 1486 - DNA, 101 bp, synthetic construct
  source 1..101: mol_type = other DNA
gcgcgggtacgcaggttttagagctacctacacgatagtggtcgtgcgcttttttttcagccaactccaattttttttgcgcacgaccactatcgtgtagg

SEQ ID NO: 1487 - DNA, 102 bp, synthetic construct
  source 1..102: mol_type = other DNA
gtgccggcggcgagggttttagagctacctacacgatagtggtcgtgcgcttttttttcagccaactccaattttttttgcgcacgaccactatcgtgtagg

SEQ ID NO: 1488 - DNA, 102 bp, synthetic construct
  source 1..102: mol_type = other DNA
gcaggagctcccaaagttttagagctacctacacgatagtggtcgtgcgcttttttttcagccaactccaattttttttgcgcacgaccactatcgtgtagg

SEQ ID NO: 1489 - DNA, 104 bp, synthetic construct
  source 1..104: mol_type = other DNA
gctggcacgcgcctagttttagagctaccttcccgacttccgtaggagcgcttttttttcagccaactccaattttttttgcgctcctacggaagtcgggaagg

SEQ ID NO: 1490 - DNA, 103 bp, synthetic construct
  source 1..103: mol_type = other DNA
gcgcgggtacgcaggttttagagctaccttcccgacttccgtaggagcgcttttttttcagccaactccaattttttttgcgctcctacggaagtcgggaagg

SEQ ID NO: 1491 - DNA, 104 bp, synthetic construct
  source 1..104: mol_type = other DNA
gtgccggcggcgagggttttagagctaccttcccgacttccgtaggagcgcttttttttcagccaactccaattttttttgcgctcctacggaagtcgggaagg

SEQ ID NO: 1492 - DNA, 104 bp, synthetic construct
  source 1..104: mol_type = other DNA
gcaggagctcccaaagttttagagctaccttcccgacttccgtaggagcgcttttttttcagccaactccaattttttttgcgctcctacggaagtcgggaagg

SEQ ID NO: 1493 - DNA, 104 bp, synthetic construct
  source 1..104: mol_type = other DNA
gctggcacgcgcctagttttagagctacctgaaggtaaagatcgggtcctcttttttttcagccaactccaattttttttgaggacccgatctttaccttcagg

SEQ ID NO: 1494 - DNA, 103 bp, synthetic construct
  source 1..103: mol_type = other DNA
gcgcgggtacgcaggttttagagctacctgaaggtaaagatcgggtcctcttttttttcagccaactccaattttttttgaggacccgatctttaccttcagg

SEQ ID NO: 1495 - DNA, 104 bp, synthetic construct
  source 1..104: mol_type = other DNA
gtgccggcggcgagggttttagagctacctgaaggtaaagatcgggtcctcttttttttcagccaactccaattttttttgaggacccgatctttaccttcagg

SEQ ID NO: 1496 - DNA, 104 bp, synthetic construct
  source 1..104: mol_type = other DNA
gcaggagctcccaaagttttagagctacctgaaggtaaagatcgggtcctcttttttttcagccaactccaattttttttgaggacccgatctttaccttcagg

SEQ ID NO: 1497 - DNA, 102 bp, synthetic construct
  source 1..102: mol_type = other DNA
gctggcacgcgcctagttttagagctacctggttatagcggacgcactgtttttttttcagccaactccaattttttttacagtgcgtccgctataaccagg

SEQ ID NO: 1498 - DNA, 101 bp, synthetic construct
  source 1..101: mol_type = other DNA
gcgcgggtacgcaggttttagagctacctggttatagcggacgcactgtttttttttcagccaactccaattttttttacagtgcgtccgctataaccagg

SEQ ID NO: 1499 - DNA, 102 bp, synthetic construct
  source 1..102: mol_type = other DNA
gtgccggcggcgagggttttagagctacctggttatagcggacgcactgtttttttttcagccaactccaattttttttacagtgcgtccgctataaccagg

SEQ ID NO: 1500 - DNA, 102 bp, synthetic construct
  source 1..102: mol_type = other DNA
gcaggagctcccaaagttttagagctacctggttatagcggacgcactgtttttttttcagccaactccaattttttttacagtgcgtccgctataaccagg

SEQ ID NO: 1501 - DNA, 102 bp, synthetic construct
  source 1..102: mol_type = other DNA
gctggcacgcgcctagttttagagctaccgcatcgtattatctgcgaagcttttttttcagccaactccaattttttttgcttcgcagataatacgatgcgg

SEQ ID NO: 1502 - DNA, 101 bp, synthetic construct
  source 1..101: mol_type = other DNA
gcgcgggtacgcaggttttagagctaccgcatcgtattatctgcgaagcttttttttcagccaactccaattttttttgcttcgcagataatacgatgcgg

SEQ ID NO: 1503 - DNA, 102 bp, synthetic construct
  source 1..102: mol_type = other DNA
gtgccggcggcgagggttttagagctaccgcatcgtattatctgcgaagcttttttttcagccaactccaattttttttgcttcgcagataatacgatgcgg

SEQ ID NO: 1504 - DNA, 102 bp, synthetic construct
  source 1..102: mol_type = other DNA
gcaggagctcccaaagttttagagctaccgcatcgtattatctgcgaagcttttttttcagccaactccaattttttttgcttcgcagataatacgatgcgg

SEQ ID NO: 1505 - DNA, 102 bp, synthetic construct
  source 1..102: mol_type = other DNA
gctggcacgcgcctagttttagagctaccgctaggacgttcaacggagtcttttttttcagccaactccaattttttttgactccgttgaacgtcctagcgg

SEQ ID NO: 1506 - DNA, 101 bp, synthetic construct
  source 1..101: mol_type = other DNA
gcgcgggtacgcaggttttagagctaccgctaggacgttcaacggagtcttttttttcagccaactccaattttttttgactccgttgaacgtcctagcgg

SEQ ID NO: 1507 - DNA, 102 bp, synthetic construct
  source 1..102: mol_type = other DNA
gtgccggcggcgagggttttagagctaccgctaggacgttcaacggagtcttttttttcagccaactccaattttttttgactccgttgaacgtcctagcgg

SEQ ID NO: 1508 - DNA, 102 bp, synthetic construct
  source 1..102: mol_type = other DNA
gcaggagctcccaaagttttagagctaccgctaggacgttcaacggagtcttttttttcagccaactccaattttttttgactccgttgaacgtcctagcgg

SEQ ID NO: 1509 - DNA, 102 bp, synthetic construct
  source 1..102: mol_type = other DNA
gctggcacgcgcctagttttagagctaccatagcggtactatcggcatctttttttttcagccaactccaattttttttagatgccgatagtaccgctatgg

SEQ ID NO: 1510 - DNA, 101 bp, synthetic construct
  source 1..101: mol_type = other DNA
gcgcgggtacgcaggttttagagctaccatagcggtactatcggcatctttttttttcagccaactccaattttttttagatgccgatagtaccgctatgg

SEQ ID NO: 1511 - DNA, 102 bp, synthetic construct
  source 1..102: mol_type = other DNA
gtgccggcggcgagggttttagagctaccatagcggtactatcggcatctttttttttcagccaactccaattttttttagatgccgatagtaccgctatgg

SEQ ID NO: 1512 - DNA, 102 bp, synthetic construct
  source 1..102: mol_type = other DNA
gcaggagctcccaaagttttagagctaccatagcggtactatcggcatctttttttttcagccaactccaattttttttagatgccgatagtaccgctatgg

SEQ ID NO: 1513 - DNA, 102 bp, synthetic construct
  source 1..102: mol_type = other DNA
gctggcacgcgcctagttttagagctacctcgtactagtctcgcatgaccttttttttcagccaactccaattttttttggtcatgcgagactagtacgagg

SEQ ID NO: 1514 - DNA, 101 bp, synthetic construct
  source 1..101: mol_type = other DNA
gcgcgggtacgcaggttttagagctacctcgtactagtctcgcatgaccttttttttcagccaactccaattttttttggtcatgcgagactagtacgagg

SEQ ID NO: 1515 - DNA, 102 bp, synthetic construct
  source 1..102: mol_type = other DNA
gtgccggcggcgagggttttagagctacctcgtactagtctcgcatgaccttttttttcagccaactccaattttttttggtcatgcgagactagtacgagg

SEQ ID NO: 1516 - DNA, 102 bp, synthetic construct
  source 1..102: mol_type = other DNA
gcaggagctcccaaagttttagagctacctcgtactagtctcgcatgaccttttttttcagccaactccaattttttttggtcatgcgagactagtacgagg

SEQ ID NO: 1517 - DNA, 102 bp, synthetic construct
  source 1..102: mol_type = other DNA
gctggcacgcgcctagttttagagctaccgatagtgctaaacgacgctttttttttttcagccaactccaattttttttaaagcgtcgtttagcactatcgg

SEQ ID NO: 1518 - DNA, 101 bp, synthetic construct
  source 1..101: mol_type = other DNA
gcgcgggtacgcaggttttagagctaccgatagtgctaaacgacgctttttttttttcagccaactccaattttttttaaagcgtcgtttagcactatcgg

SEQ ID NO: 1519 - DNA, 102 bp, synthetic construct
  source 1..102: mol_type = other DNA
gtgccggcggcgagggttttagagctaccgatagtgctaaacgacgctttttttttttcagccaactccaattttttttaaagcgtcgtttagcactatcgg

SEQ ID NO: 1520 - DNA, 102 bp, synthetic construct
  source 1..102: mol_type = other DNA
gcaggagctcccaaagttttagagctaccgatagtgctaaacgacgctttttttttttcagccaactccaattttttttaaagcgtcgtttagcactatcgg

SEQ ID NO: 1521 - DNA, 102 bp, synthetic construct
  source 1..102: mol_type = other DNA
gctggcacgcgcctagttttagagctacccgttatcgacgttcaaggaacttttttttcagccaactccaattttttttgttccttgaacgtcgataacggg

SEQ ID NO: 1522 - DNA, 101 bp, synthetic construct
  source 1..101: mol_type = other DNA
gcgcgggtacgcaggttttagagctacccgttatcgacgttcaaggaacttttttttcagccaactccaattttttttgttccttgaacgtcgataacggg

SEQ ID NO: 1523 - DNA, 102 bp, synthetic construct
  source 1..102: mol_type = other DNA
gtgccggcggcgagggttttagagctacccgttatcgacgttcaaggaacttttttttcagccaactccaattttttttgttccttgaacgtcgataacggg

SEQ ID NO: 1524 - DNA, 102 bp, synthetic construct
  source 1..102: mol_type = other DNA
gcaggagctcccaaagttttagagctacccgttatcgacgttcaaggaacttttttttcagccaactccaattttttttgttccttgaacgtcgataacggg

SEQ ID NO: 1525 - DNA, 102 bp, synthetic construct
  source 1..102: mol_type = other DNA
gctggcacgcgcctagttttagagctaccgatcaatgcggtctgcgtaacttttttttcagccaactccaattttttttgttacgcagaccgcattgatcgg

SEQ ID NO: 1526 - DNA, 101 bp, synthetic construct
  source 1..101: mol_type = other DNA
gcgcgggtacgcaggttttagagctaccgatcaatgcggtctgcgtaacttttttttcagccaactccaattttttttgttacgcagaccgcattgatcgg

SEQ ID NO: 1527 - DNA, 102 bp, synthetic construct
  source 1..102: mol_type = other DNA
gtgccggcggcgagggttttagagctaccgatcaatgcggtctgcgtaacttttttttcagccaactccaattttttttgttacgcagaccgcattgatcgg

SEQ ID NO: 1528 - DNA, 102 bp, synthetic construct
  source 1..102: mol_type = other DNA
gcaggagctcccaaagttttagagctaccgatcaatgcggtctgcgtaacttttttttcagccaactccaattttttttgttacgcagaccgcattgatcgg

SEQ ID NO: 1529 - DNA, 102 bp, synthetic construct
  source 1..102: mol_type = other DNA
gctggcacgcgcctagttttagagctacccttactcgcgatactctcgacttttttttcagccaactccaattttttttgtcgagagtatcgcgagtaaggg

SEQ ID NO: 1530 - DNA, 101 bp, synthetic construct
  source 1..101: mol_type = other DNA
gcgcgggtacgcaggttttagagctacccttactcgcgatactctcgacttttttttcagccaactccaattttttttgtcgagagtatcgcgagtaaggg

SEQ ID NO: 1531 - DNA, 102 bp, synthetic construct
  source 1..102: mol_type = other DNA
gtgccggcggcgagggttttagagctacccttactcgcgatactctcgacttttttttcagccaactccaattttttttgtcgagagtatcgcgagtaaggg

SEQ ID NO: 1532 - DNA, 102 bp, synthetic construct
  source 1..102: mol_type = other DNA
gcaggagctcccaaagttttagagctacccttactcgcgatactctcgacttttttttcagccaactccaattttttttgtcgagagtatcgcgagtaaggg

SEQ ID NO: 1533 - DNA, 102 bp, synthetic construct
  source 1..102: mol_type = other DNA
gctggcacgcgcctagttttagagctaccgcggacggtaagcacggaatattttttttcagccaactccaatttttttttattccgtgcttaccgtccgcgg

SEQ ID NO: 1534 - DNA, 101 bp, synthetic construct
  source 1..101: mol_type = other DNA
gcgcgggtacgcaggttttagagctaccgcggacggtaagcacggaatattttttttcagccaactccaatttttttttattccgtgcttaccgtccgcgg

SEQ ID NO: 1535 - DNA, 102 bp, synthetic construct
  source 1..102: mol_type = other DNA
gtgccggcggcgagggttttagagctaccgcggacggtaagcacggaatattttttttcagccaactccaatttttttttattccgtgcttaccgtccgcgg

SEQ ID NO: 1536 - DNA, 102 bp, synthetic construct
  source 1..102: mol_type = other DNA
gcaggagctcccaaagttttagagctaccgcggacggtaagcacggaatattttttttcagccaactccaatttttttttattccgtgcttaccgtccgcgg

SEQ ID NO: 1537 - DNA, 102 bp, synthetic construct
  source 1..102: mol_type = other DNA
gctggcacgcgcctagttttagagctacctatagtcacgaatcgtagggtttttttttcagccaactccaattttttttaccctacgattcgtgactatagg

SEQ ID NO: 1538 - DNA, 101 bp, synthetic construct
  source 1..101: mol_type = other DNA
gcgcgggtacgcaggttttagagctacctatagtcacgaatcgtagggtttttttttcagccaactccaattttttttaccctacgattcgtgactatagg

SEQ ID NO: 1539 - DNA, 102 bp, synthetic construct
  source 1..102: mol_type = other DNA
gtgccggcggcgagggttttagagctacctatagtcacgaatcgtagggtttttttttcagccaactccaattttttttaccctacgattcgtgactatagg

SEQ ID NO: 1540 - DNA, 102 bp, synthetic construct
  source 1..102: mol_type = other DNA
gcaggagctcccaaagttttagagctacctatagtcacgaatcgtagggtttttttttcagccaactccaattttttttaccctacgattcgtgactatagg

SEQ ID NO: 1541 - DNA, 102 bp, synthetic construct
  source 1..102: mol_type = other DNA
gctggcacgcgcctagttttagagctacccgtcgtcacgtatgcgtagcattttttttcagccaactccaatttttttttgctacgcatacgtgacgacggg

SEQ ID NO: 1542 - DNA, 101 bp, synthetic construct
  source 1..101: mol_type = other DNA
gcgcgggtacgcaggttttagagctacccgtcgtcacgtatgcgtagcattttttttcagccaactccaatttttttttgctacgcatacgtgacgacggg

SEQ ID NO: 1543 - DNA, 102 bp, synthetic construct
  source 1..102: mol_type = other DNA
gtgccggcggcgagggttttagagctacccgtcgtcacgtatgcgtagcattttttttcagccaactccaatttttttttgctacgcatacgtgacgacggg

SEQ ID NO: 1544 - DNA, 102 bp, synthetic construct
  source 1..102: mol_type = other DNA
gcaggagctcccaaagttttagagctacccgtcgtcacgtatgcgtagcattttttttcagccaactccaatttttttttgctacgcatacgtgacgacggg

SEQ ID NO: 1545 - DNA, 102 bp, synthetic construct
  source 1..102: mol_type = other DNA
gctggcacgcgcctagttttagagctacccgagaggtagtagacgacgcattttttttcagccaactccaatttttttttgcgtcgtctactacctctcggg

SEQ ID NO: 1546 - DNA, 101 bp, synthetic construct
  source 1..101: mol_type = other DNA
gcgcgggtacgcaggttttagagctacccgagaggtagtagacgacgcattttttttcagccaactccaatttttttttgcgtcgtctactacctctcggg

SEQ ID NO: 1547 - DNA, 102 bp, synthetic construct
  source 1..102: mol_type = other DNA
gtgccggcggcgagggttttagagctacccgagaggtagtagacgacgcattttttttcagccaactccaatttttttttgcgtcgtctactacctctcggg

SEQ ID NO: 1548 - DNA, 102 bp, synthetic construct
  source 1..102: mol_type = other DNA
gcaggagctcccaaagttttagagctacccgagaggtagtagacgacgcattttttttcagccaactccaatttttttttgcgtcgtctactacctctcggg

SEQ ID NO: 1549 - DNA, 102 bp, synthetic construct
  source 1..102: mol_type = other DNA
gctggcacgcgcctagttttagagctaccgacgtctacggacgggagctattttttttcagccaactccaatttttttttagctcccgtccgtagacgtcgg

SEQ ID NO: 1550 - DNA, 101 bp, synthetic construct
  source 1..101: mol_type = other DNA
gcgcgggtacgcaggttttagagctaccgacgtctacggacgggagctattttttttcagccaactccaatttttttttagctcccgtccgtagacgtcgg

SEQ ID NO: 1551 - DNA, 102 bp, synthetic construct
  source 1..102: mol_type = other DNA
gtgccggcggcgagggttttagagctaccgacgtctacggacgggagctattttttttcagccaactccaatttttttttagctcccgtccgtagacgtcgg

SEQ ID NO: 1552 - DNA, 102 bp, synthetic construct
  source 1..102: mol_type = other DNA
gcaggagctcccaaagttttagagctaccgacgtctacggacgggagctattttttttcagccaactccaatttttttttagctcccgtccgtagacgtcgg

SEQ ID NO: 1553 - DNA, 102 bp, synthetic construct
  source 1..102: mol_type = other DNA
gctggcacgcgcctagttttagagctaccaaagctcattcgcgactgagcttttttttcagccaactccaattttttttgctcagtcgcgaatgagctttgg

SEQ ID NO: 1554 - DNA, 101 bp, synthetic construct
  source 1..101: mol_type = other DNA
gcgcgggtacgcaggttttagagctaccaaagctcattcgcgactgagcttttttttcagccaactccaattttttttgctcagtcgcgaatgagctttgg

SEQ ID NO: 1555 - DNA, 102 bp, synthetic construct
  source 1..102: mol_type = other DNA
gtgccggcggcgagggttttagagctaccaaagctcattcgcgactgagcttttttttcagccaactccaattttttttgctcagtcgcgaatgagctttgg

SEQ ID NO: 1556 - DNA, 102 bp, synthetic construct
  source 1..102: mol_type = other DNA
gcaggagctcccaaagttttagagctaccaaagctcattcgcgactgagcttttttttcagccaactccaattttttttgctcagtcgcgaatgagctttgg

SEQ ID NO: 1557 - DNA, 102 bp, synthetic construct
  source 1..102: mol_type = other DNA
gctggcacgcgcctagttttagagctaccatggcacgatcgacacggaggttttttttcagccaactccaattttttttcctccgtgtcgatcgtgccatgg

SEQ ID NO: 1558 - DNA, 101 bp, synthetic construct
  source 1..101: mol_type = other DNA
gcgcgggtacgcaggttttagagctaccatggcacgatcgacacggaggttttttttcagccaactccaattttttttcctccgtgtcgatcgtgccatgg

SEQ ID NO: 1559 - DNA, 102 bp, synthetic construct
  source 1..102: mol_type = other DNA
gtgccggcggcgagggttttagagctaccatggcacgatcgacacggaggttttttttcagccaactccaattttttttcctccgtgtcgatcgtgccatgg

SEQ ID NO: 1560 - DNA, 102 bp, synthetic construct
  source 1..102: mol_type = other DNA
gcaggagctcccaaagttttagagctaccatggcacgatcgacacggaggttttttttcagccaactccaattttttttcctccgtgtcgatcgtgccatgg

SEQ ID NO: 1561 - DNA, 102 bp, synthetic construct
  source 1..102: mol_type = other DNA
gctggcacgcgcctagttttagagctacccgaactctctatcgaacgagtttttttttcagccaactccaattttttttactcgttcgatagagagttcggg

SEQ ID NO: 1562 - DNA, 101 bp, synthetic construct
  source 1..101: mol_type = other DNA
gcgcgggtacgcaggttttagagctacccgaactctctatcgaacgagtttttttttcagccaactccaattttttttactcgttcgatagagagttcggg

SEQ ID NO: 1563 - DNA, 102 bp, synthetic construct
  source 1..102: mol_type = other DNA
gtgccggcggcgagggttttagagctacccgaactctctatcgaacgagtttttttttcagccaactccaattttttttactcgttcgatagagagttcggg

SEQ ID NO: 1564 - DNA, 102 bp, synthetic construct
  source 1..102: mol_type = other DNA
gcaggagctcccaaagttttagagctacccgaactctctatcgaacgagtttttttttcagccaactccaattttttttactcgttcgatagagagttcggg

SEQ ID NO: 1565 - DNA, 104 bp, synthetic construct
  source 1..104: mol_type = other DNA
gcccacctttatcttgttttagagctaccgtcgttgtaccgtctacttgacttttttttcagccaactccaattttttttgtcaagtagacggtacaacgacgg

SEQ ID NO: 1566 - DNA, 103 bp, synthetic construct
  source 1..103: mol_type = other DNA
ggggcgcatctgatgttttagagctaccgtcgttgtaccgtctacttgacttttttttcagccaactccaattttttttgtcaagtagacggtacaacgacgg

SEQ ID NO: 1567 - DNA, 104 bp, synthetic construct
  source 1..104: mol_type = other DNA
gcagggggaaacgcagttttagagctaccgtcgttgtaccgtctacttgacttttttttcagccaactccaattttttttgtcaagtagacggtacaacgacgg

SEQ ID NO: 1568 - DNA, 103 bp, synthetic construct
  source 1..103: mol_type = other DNA
gcctctgtggaccggttttagagctaccgtcgttgtaccgtctacttgacttttttttcagccaactccaattttttttgtcaagtagacggtacaacgacgg

SEQ ID NO: 1569 - DNA, 102 bp, synthetic construct
  source 1..102: mol_type = other DNA
gcccacctttatcttgttttagagctacctacactcgacatcggtagctattttttttcagccaactccaatttttttttagctaccgatgtcgagtgtagg

SEQ ID NO: 1570 - DNA, 101 bp, synthetic construct
  source 1..101: mol_type = other DNA
ggggcgcatctgatgttttagagctacctacactcgacatcggtagctattttttttcagccaactccaatttttttttagctaccgatgtcgagtgtagg

SEQ ID NO: 1571 - DNA, 102 bp, synthetic construct
  source 1..102: mol_type = other DNA
gcagggggaaacgcagttttagagctacctacactcgacatcggtagctattttttttcagccaactccaatttttttttagctaccgatgtcgagtgtagg

SEQ ID NO: 1572 - DNA, 101 bp, synthetic construct
  source 1..101: mol_type = other DNA
gcctctgtggaccggttttagagctacctacactcgacatcggtagctattttttttcagccaactccaatttttttttagctaccgatgtcgagtgtagg

SEQ ID NO: 1573 - DNA, 102 bp, synthetic construct
  source 1..102: mol_type = other DNA
gcccacctttatcttgttttagagctaccctggcggaacgttcgagtaatttttttttcagccaactccaattttttttattactcgaacgttccgccaggg

SEQ ID NO: 1574 - DNA, 101 bp, synthetic construct
  source 1..101: mol_type = other DNA
ggggcgcatctgatgttttagagctaccctggcggaacgttcgagtaatttttttttcagccaactccaattttttttattactcgaacgttccgccaggg

SEQ ID NO: 1575 - DNA, 102 bp, synthetic construct
  source 1..102: mol_type = other DNA
gcagggggaaacgcagttttagagctaccctggcggaacgttcgagtaatttttttttcagccaactccaattttttttattactcgaacgttccgccaggg

SEQ ID NO: 1576 - DNA, 101 bp, synthetic construct
  source 1..101: mol_type = other DNA
gcctctgtggaccggttttagagctaccctggcggaacgttcgagtaatttttttttcagccaactccaattttttttattactcgaacgttccgccaggg

SEQ ID NO: 1577 - DNA, 102 bp, synthetic construct
  source 1..102: mol_type = other DNA
gcccacctttatcttgttttagagctacctacacgatagtggtcgtgcgcttttttttcagccaactccaattttttttgcgcacgaccactatcgtgtagg

SEQ ID NO: 1578 - DNA, 101 bp, synthetic construct
  source 1..101: mol_type = other DNA
ggggcgcatctgatgttttagagctacctacacgatagtggtcgtgcgcttttttttcagccaactccaattttttttgcgcacgaccactatcgtgtagg

SEQ ID NO: 1579 - DNA, 102 bp, synthetic construct
  source 1..102: mol_type = other DNA
gcagggggaaacgcagttttagagctacctacacgatagtggtcgtgcgcttttttttcagccaactccaattttttttgcgcacgaccactatcgtgtagg

SEQ ID NO: 1580 - DNA, 101 bp, synthetic construct
  source 1..101: mol_type = other DNA
gcctctgtggaccggttttagagctacctacacgatagtggtcgtgcgcttttttttcagccaactccaattttttttgcgcacgaccactatcgtgtagg

SEQ ID NO: 1581 - DNA, 104 bp, synthetic construct
  source 1..104: mol_type = other DNA
gcccacctttatcttgttttagagctaccttcccgacttccgtaggagcgcttttttttcagccaactccaattttttttgcgctcctacggaagtcgggaagg

SEQ ID NO: 1582 - DNA, 103 bp, synthetic construct
  source 1..103: mol_type = other DNA
ggggcgcatctgatgttttagagctaccttcccgacttccgtaggagcgcttttttttcagccaactccaattttttttgcgctcctacggaagtcgggaagg

SEQ ID NO: 1583 - DNA, 104 bp, synthetic construct
  source 1..104: mol_type = other DNA
gcagggggaaacgcagttttagagctaccttcccgacttccgtaggagcgcttttttttcagccaactccaattttttttgcgctcctacggaagtcgggaagg

SEQ ID NO: 1584 - DNA, 103 bp, synthetic construct
  source 1..103: mol_type = other DNA
gcctctgtggaccggttttagagctaccttcccgacttccgtaggagcgcttttttttcagccaactccaattttttttgcgctcctacggaagtcgggaagg

SEQ ID NO: 1585 - DNA, 104 bp, synthetic construct
  source 1..104: mol_type = other DNA
gcccacctttatcttgttttagagctacctgaaggtaaagatcgggtcctcttttttttcagccaactccaattttttttgaggacccgatctttaccttcagg

SEQ ID NO: 1586 - DNA, 103 bp, synthetic construct
  source 1..103: mol_type = other DNA
ggggcgcatctgatgttttagagctacctgaaggtaaagatcgggtcctcttttttttcagccaactccaattttttttgaggacccgatctttaccttcagg

SEQ ID NO: 1587 - DNA, 104 bp, synthetic construct
  source 1..104: mol_type = other DNA
gcagggggaaacgcagttttagagctacctgaaggtaaagatcgggtcctcttttttttcagccaactccaattttttttgaggacccgatctttaccttcagg

SEQ ID NO: 1588 - DNA, 103 bp, synthetic construct
  source 1..103: mol_type = other DNA
gcctctgtggaccggttttagagctacctgaaggtaaagatcgggtcctcttttttttcagccaactccaattttttttgaggacccgatctttaccttcagg

SEQ ID NO: 1589 - DNA, 102 bp, synthetic construct
  source 1..102: mol_type = other DNA
gcccacctttatcttgttttagagctacctggttatagcggacgcactgtttttttttcagccaactccaattttttttacagtgcgtccgctataaccagg

SEQ ID NO: 1590 - DNA, 101 bp, synthetic construct
  source 1..101: mol_type = other DNA
ggggcgcatctgatgttttagagctacctggttatagcggacgcactgtttttttttcagccaactccaattttttttacagtgcgtccgctataaccagg

SEQ ID NO: 1591 - DNA, 102 bp, synthetic construct
  source 1..102: mol_type = other DNA
gcagggggaaacgcagttttagagctacctggttatagcggacgcactgtttttttttcagccaactccaattttttttacagtgcgtccgctataaccagg

SEQ ID NO: 1592 - DNA, 101 bp, synthetic construct
  source 1..101: mol_type = other DNA
gcctctgtggaccggttttagagctacctggttatagcggacgcactgtttttttttcagccaactccaattttttttacagtgcgtccgctataaccagg

SEQ ID NO: 1593 - DNA, 102 bp, synthetic construct
  source 1..102: mol_type = other DNA
gcccacctttatcttgttttagagctaccgcatcgtattatctgcgaagcttttttttcagccaactccaattttttttgcttcgcagataatacgatgcgg

SEQ ID NO: 1594 - DNA, 101 bp, synthetic construct
  source 1..101: mol_type = other DNA
ggggcgcatctgatgttttagagctaccgcatcgtattatctgcgaagcttttttttcagccaactccaattttttttgcttcgcagataatacgatgcgg

SEQ ID NO: 1595 - DNA, 102 bp, synthetic construct
  source 1..102: mol_type = other DNA
gcagggggaaacgcagttttagagctaccgcatcgtattatctgcgaagcttttttttcagccaactccaattttttttgcttcgcagataatacgatgcgg

SEQ ID NO: 1596 - DNA, 101 bp, synthetic construct
  source 1..101: mol_type = other DNA
gcctctgtggaccggttttagagctaccgcatcgtattatctgcgaagcttttttttcagccaactccaattttttttgcttcgcagataatacgatgcgg

SEQ ID NO: 1597 - DNA, 102 bp, synthetic construct
  source 1..102: mol_type = other DNA
gcccacctttatcttgttttagagctaccgctaggacgttcaacggagtcttttttttcagccaactccaattttttttgactccgttgaacgtcctagcgg

SEQ ID NO: 1598 - DNA, 101 bp, synthetic construct
  source 1..101: mol_type = other DNA
ggggcgcatctgatgttttagagctaccgctaggacgttcaacggagtcttttttttcagccaactccaattttttttgactccgttgaacgtcctagcgg

SEQ ID NO: 1599 - DNA, 102 bp, synthetic construct
  source 1..102: mol_type = other DNA
gcagggggaaacgcagttttagagctaccgctaggacgttcaacggagtcttttttttcagccaactccaattttttttgactccgttgaacgtcctagcgg

SEQ ID NO: 1600 - DNA, 101 bp, synthetic construct
  source 1..101: mol_type = other DNA
gcctctgtggaccggttttagagctaccgctaggacgttcaacggagtcttttttttcagccaactccaattttttttgactccgttgaacgtcctagcgg

SEQ ID NO: 1601 - DNA, 102 bp, synthetic construct
  source 1..102: mol_type = other DNA
gcccacctttatcttgttttagagctaccatagcggtactatcggcatctttttttttcagccaactccaattttttttagatgccgatagtaccgctatgg

SEQ ID NO: 1602 - DNA, 101 bp, synthetic construct
  source 1..101: mol_type = other DNA
ggggcgcatctgatgttttagagctaccatagcggtactatcggcatctttttttttcagccaactccaattttttttagatgccgatagtaccgctatgg

SEQ ID NO: 1603 - DNA, 102 bp, synthetic construct
  source 1..102: mol_type = other DNA
gcagggggaaacgcagttttagagctaccatagcggtactatcggcatctttttttttcagccaactccaattttttttagatgccgatagtaccgctatgg

SEQ ID NO: 1604 - DNA, 101 bp, synthetic construct
  source 1..101: mol_type = other DNA
gcctctgtggaccggttttagagctaccatagcggtactatcggcatctttttttttcagccaactccaattttttttagatgccgatagtaccgctatgg

SEQ ID NO: 1605 - DNA, 102 bp, synthetic construct
  source 1..102: mol_type = other DNA
gcccacctttatcttgttttagagctacctcgtactagtctcgcatgaccttttttttcagccaactccaattttttttggtcatgcgagactagtacgagg

SEQ ID NO: 1606 - DNA, 101 bp, synthetic construct
  source 1..101: mol_type = other DNA
ggggcgcatctgatgttttagagctacctcgtactagtctcgcatgaccttttttttcagccaactccaattttttttggtcatgcgagactagtacgagg

SEQ ID NO: 1607 - DNA, 102 bp, synthetic construct
  source 1..102: mol_type = other DNA
gcagggggaaacgcagttttagagctacctcgtactagtctcgcatgaccttttttttcagccaactccaattttttttggtcatgcgagactagtacgagg

SEQ ID NO: 1608 - DNA, 101 bp, synthetic construct
  source 1..101: mol_type = other DNA
gcctctgtggaccggttttagagctacctcgtactagtctcgcatgaccttttttttcagccaactccaattttttttggtcatgcgagactagtacgagg

SEQ ID NO: 1609 - DNA, 102 bp, synthetic construct
  source 1..102: mol_type = other DNA
gcccacctttatcttgttttagagctaccgatagtgctaaacgacgctttttttttttcagccaactccaattttttttaaagcgtcgtttagcactatcgg

SEQ ID NO: 1610 - DNA, 101 bp, synthetic construct
  source 1..101: mol_type = other DNA
ggggcgcatctgatgttttagagctaccgatagtgctaaacgacgctttttttttttcagccaactccaattttttttaaagcgtcgtttagcactatcgg

SEQ ID NO: 1611 - DNA, 102 bp, synthetic construct
  source 1..102: mol_type = other DNA
gcagggggaaacgcagttttagagctaccgatagtgctaaacgacgctttttttttttcagccaactccaattttttttaaagcgtcgtttagcactatcgg

SEQ ID NO: 1612 - DNA, 101 bp, synthetic construct
  source 1..101: mol_type = other DNA
gcctctgtggaccggttttagagctaccgatagtgctaaacgacgctttttttttttcagccaactccaattttttttaaagcgtcgtttagcactatcgg

SEQ ID NO: 1613 - DNA, 102 bp, synthetic construct
  source 1..102: mol_type = other DNA
gcccacctttatcttgttttagagctacccgttatcgacgttcaaggaacttttttttcagccaactccaattttttttgttccttgaacgtcgataacggg

SEQ ID NO: 1614 - DNA, 101 bp, synthetic construct
  source 1..101: mol_type = other DNA
ggggcgcatctgatgttttagagctacccgttatcgacgttcaaggaacttttttttcagccaactccaattttttttgttccttgaacgtcgataacggg

SEQ ID NO: 1615 - DNA, 102 bp, synthetic construct
  source 1..102: mol_type = other DNA
gcagggggaaacgcagttttagagctacccgttatcgacgttcaaggaacttttttttcagccaactccaattttttttgttccttgaacgtcgataacggg

SEQ ID NO: 1616 - DNA, 101 bp, synthetic construct
  source 1..101: mol_type = other DNA
gcctctgtggaccggttttagagctacccgttatcgacgttcaaggaacttttttttcagccaactccaattttttttgttccttgaacgtcgataacggg

SEQ ID NO: 1617 - DNA, 102 bp, synthetic construct
  source 1..102: mol_type = other DNA
gcccacctttatcttgttttagagctaccgatcaatgcggtctgcgtaacttttttttcagccaactccaattttttttgttacgcagaccgcattgatcgg

SEQ ID NO: 1618 - DNA, 101 bp, synthetic construct
  source 1..101: mol_type = other DNA
ggggcgcatctgatgttttagagctaccgatcaatgcggtctgcgtaacttttttttcagccaactccaattttttttgttacgcagaccgcattgatcgg

SEQ ID NO: 1619 - DNA, 102 bp, synthetic construct
  source 1..102: mol_type = other DNA
gcagggggaaacgcagttttagagctaccgatcaatgcggtctgcgtaacttttttttcagccaactccaattttttttgttacgcagaccgcattgatcgg

SEQ ID NO: 1620 - DNA, 101 bp, synthetic construct
  source 1..101: mol_type = other DNA
gcctctgtggaccggttttagagctaccgatcaatgcggtctgcgtaacttttttttcagccaactccaattttttttgttacgcagaccgcattgatcgg

SEQ ID NO: 1621 - DNA, 102 bp, synthetic construct
  source 1..102: mol_type = other DNA
gcccacctttatcttgttttagagctacccttactcgcgatactctcgacttttttttcagccaactccaattttttttgtcgagagtatcgcgagtaaggg

SEQ ID NO: 1622 - DNA, 101 bp, synthetic construct
  source 1..101: mol_type = other DNA
ggggcgcatctgatgttttagagctacccttactcgcgatactctcgacttttttttcagccaactccaattttttttgtcgagagtatcgcgagtaaggg

SEQ ID NO: 1623 - DNA, 102 bp, synthetic construct
  source 1..102: mol_type = other DNA
gcagggggaaacgcagttttagagctacccttactcgcgatactctcgacttttttttcagccaactccaattttttttgtcgagagtatcgcgagtaaggg

SEQ ID NO: 1624 - DNA, 101 bp, synthetic construct
  source 1..101: mol_type = other DNA
gcctctgtggaccggttttagagctacccttactcgcgatactctcgacttttttttcagccaactccaattttttttgtcgagagtatcgcgagtaaggg

SEQ ID NO: 1625 - DNA, 102 bp, synthetic construct
  source 1..102: mol_type = other DNA
gcccacctttatcttgttttagagctaccgcggacggtaagcacggaatattttttttcagccaactccaatttttttttattccgtgcttaccgtccgcgg

SEQ ID NO: 1626 - DNA, 101 bp, synthetic construct
  source 1..101: mol_type = other DNA
ggggcgcatctgatgttttagagctaccgcggacggtaagcacggaatattttttttcagccaactccaatttttttttattccgtgcttaccgtccgcgg

SEQ ID NO: 1627 - DNA, 102 bp, synthetic construct
  source 1..102: mol_type = other DNA
gcagggggaaacgcagttttagagctaccgcggacggtaagcacggaatattttttttcagccaactccaatttttttttattccgtgcttaccgtccgcgg

SEQ ID NO: 1628 - DNA, 101 bp, synthetic construct
  source 1..101: mol_type = other DNA
gcctctgtggaccggttttagagctaccgcggacggtaagcacggaatattttttttcagccaactccaatttttttttattccgtgcttaccgtccgcgg

SEQ ID NO: 1629 - DNA, 102 bp, synthetic construct
  source 1..102: mol_type = other DNA
gcccacctttatcttgttttagagctacctatagtcacgaatcgtagggtttttttttcagccaactccaattttttttaccctacgattcgtgactatagg

SEQ ID NO: 1630 - DNA, 101 bp, synthetic construct
  source 1..101: mol_type = other DNA
ggggcgcatctgatgttttagagctacctatagtcacgaatcgtagggtttttttttcagccaactccaattttttttaccctacgattcgtgactatagg

SEQ ID NO: 1631 - DNA, 102 bp, synthetic construct
  source 1..102: mol_type = other DNA
gcagggggaaacgcagttttagagctacctatagtcacgaatcgtagggtttttttttcagccaactccaattttttttaccctacgattcgtgactatagg

SEQ ID NO: 1632 - DNA, 101 bp, synthetic construct
  source 1..101: mol_type = other DNA
gcctctgtggaccggttttagagctacctatagtcacgaatcgtagggtttttttttcagccaactccaattttttttaccctacgattcgtgactatagg

SEQ ID NO: 1633 - DNA, 102 bp, synthetic construct
  source 1..102: mol_type = other DNA
gcccacctttatcttgttttagagctacccgtcgtcacgtatgcgtagcattttttttcagccaactccaatttttttttgctacgcatacgtgacgacggg

SEQ ID NO: 1634 - DNA, 101 bp, synthetic construct
  source 1..101: mol_type = other DNA
ggggcgcatctgatgttttagagctacccgtcgtcacgtatgcgtagcattttttttcagccaactccaatttttttttgctacgcatacgtgacgacggg

SEQ ID NO: 1635 - DNA, 102 bp, synthetic construct
  source 1..102: mol_type = other DNA
gcagggggaaacgcagttttagagctacccgtcgtcacgtatgcgtagcattttttttcagccaactccaatttttttttgctacgcatacgtgacgacggg

SEQ ID NO: 1636 - DNA, 101 bp, synthetic construct
  source 1..101: mol_type = other DNA
gcctctgtggaccggttttagagctacccgtcgtcacgtatgcgtagcattttttttcagccaactccaatttttttttgctacgcatacgtgacgacggg

SEQ ID NO: 1637 - DNA, 102 bp, synthetic construct
  source 1..102: mol_type = other DNA
gcccacctttatcttgttttagagctacccgagaggtagtagacgacgcattttttttcagccaactccaatttttttttgcgtcgtctactacctctcggg

SEQ ID NO: 1638 - DNA, 101 bp, synthetic construct
  source 1..101: mol_type = other DNA
ggggcgcatctgatgttttagagctacccgagaggtagtagacgacgcattttttttcagccaactccaatttttttttgcgtcgtctactacctctcggg

SEQ ID NO: 1639 - DNA, 102 bp, synthetic construct
  source 1..102: mol_type = other DNA
gcagggggaaacgcagttttagagctacccgagaggtagtagacgacgcattttttttcagccaactccaatttttttttgcgtcgtctactacctctcggg

SEQ ID NO: 1640 - DNA, 101 bp, synthetic construct
  source 1..101: mol_type = other DNA
gcctctgtggaccggttttagagctacccgagaggtagtagacgacgcattttttttcagccaactccaatttttttttgcgtcgtctactacctctcggg

SEQ ID NO: 1641 - DNA, 102 bp, synthetic construct
  source 1..102: mol_type = other DNA
gcccacctttatcttgttttagagctaccgacgtctacggacgggagctattttttttcagccaactccaatttttttttagctcccgtccgtagacgtcgg

SEQ ID NO: 1642 - DNA, 101 bp, synthetic construct
  source 1..101: mol_type = other DNA
ggggcgcatctgatgttttagagctaccgacgtctacggacgggagctattttttttcagccaactccaatttttttttagctcccgtccgtagacgtcgg

SEQ ID NO: 1643 - DNA, 102 bp, synthetic construct
  source 1..102: mol_type = other DNA
gcagggggaaacgcagttttagagctaccgacgtctacggacgggagctattttttttcagccaactccaatttttttttagctcccgtccgtagacgtcgg

SEQ ID NO: 1644 - DNA, 101 bp, synthetic construct
  source 1..101: mol_type = other DNA
gcctctgtggaccggttttagagctaccgacgtctacggacgggagctattttttttcagccaactccaatttttttttagctcccgtccgtagacgtcgg

SEQ ID NO: 1645 - DNA, 102 bp, synthetic construct
  source 1..102: mol_type = other DNA
gcccacctttatcttgttttagagctaccaaagctcattcgcgactgagcttttttttcagccaactccaattttttttgctcagtcgcgaatgagctttgg

SEQ ID NO: 1646 - DNA, 101 bp, synthetic construct
  source 1..101: mol_type = other DNA
ggggcgcatctgatgttttagagctaccaaagctcattcgcgactgagcttttttttcagccaactccaattttttttgctcagtcgcgaatgagctttgg

SEQ ID NO: 1647 - DNA, 102 bp, synthetic construct
  source 1..102: mol_type = other DNA
gcagggggaaacgcagttttagagctaccaaagctcattcgcgactgagcttttttttcagccaactccaattttttttgctcagtcgcgaatgagctttgg

SEQ ID NO: 1648 - DNA, 101 bp, synthetic construct
  source 1..101: mol_type = other DNA
gcctctgtggaccggttttagagctaccaaagctcattcgcgactgagcttttttttcagccaactccaattttttttgctcagtcgcgaatgagctttgg

SEQ ID NO: 1649 - DNA, 102 bp, synthetic construct
  source 1..102: mol_type = other DNA
gcccacctttatcttgttttagagctaccatggcacgatcgacacggaggttttttttcagccaactccaattttttttcctccgtgtcgatcgtgccatgg

SEQ ID NO: 1650 - DNA, 101 bp, synthetic construct
  source 1..101: mol_type = other DNA
ggggcgcatctgatgttttagagctaccatggcacgatcgacacggaggttttttttcagccaactccaattttttttcctccgtgtcgatcgtgccatgg

SEQ ID NO: 1651 - DNA, 102 bp, synthetic construct
  source 1..102: mol_type = other DNA
gcagggggaaacgcagttttagagctaccatggcacgatcgacacggaggttttttttcagccaactccaattttttttcctccgtgtcgatcgtgccatgg

SEQ ID NO: 1652 - DNA, 101 bp, synthetic construct
  source 1..101: mol_type = other DNA
gcctctgtggaccggttttagagctaccatggcacgatcgacacggaggttttttttcagccaactccaattttttttcctccgtgtcgatcgtgccatgg

SEQ ID NO: 1653 - DNA, 102 bp, synthetic construct
  source 1..102: mol_type = other DNA
gcccacctttatcttgttttagagctacccgaactctctatcgaacgagtttttttttcagccaactccaattttttttactcgttcgatagagagttcggg

SEQ ID NO: 1654 - DNA, 101 bp, synthetic construct
  source 1..101: mol_type = other DNA
ggggcgcatctgatgttttagagctacccgaactctctatcgaacgagtttttttttcagccaactccaattttttttactcgttcgatagagagttcggg

SEQ ID NO: 1655 - DNA, 102 bp, synthetic construct
  source 1..102: mol_type = other DNA
gcagggggaaacgcagttttagagctacccgaactctctatcgaacgagtttttttttcagccaactccaattttttttactcgttcgatagagagttcggg

SEQ ID NO: 1656 - DNA, 101 bp, synthetic construct
  source 1..101: mol_type = other DNA
gcctctgtggaccggttttagagctacccgaactctctatcgaacgagtttttttttcagccaactccaattttttttactcgttcgatagagagttcggg

SEQ ID NO: 1657 - DNA, 104 bp, synthetic construct
  source 1..104: mol_type = other DNA
gttaggcccacgcccgttttagagctaccgtcgttgtaccgtctacttgacttttttttcagccaactccaattttttttgtcaagtagacggtacaacgacgg

SEQ ID NO: 1658 - DNA, 103 bp, synthetic construct
  source 1..103: mol_type = other DNA
gtagccttgggcgcgttttagagctaccgtcgttgtaccgtctacttgacttttttttcagccaactccaattttttttgtcaagtagacggtacaacgacgg

SEQ ID NO: 1659 - DNA, 103 bp, synthetic construct
  source 1..103: mol_type = other DNA
gcgtcctctcccacgttttagagctaccgtcgttgtaccgtctacttgacttttttttcagccaactccaattttttttgtcaagtagacggtacaacgacgg

SEQ ID NO: 1660 - DNA, 104 bp, synthetic construct
  source 1..104: mol_type = other DNA
gcccgcagtgtcactgttttagagctaccgtcgttgtaccgtctacttgacttttttttcagccaactccaattttttttgtcaagtagacggtacaacgacgg

SEQ ID NO: 1661 - DNA, 102 bp, synthetic construct
  source 1..102: mol_type = other DNA
gttaggcccacgcccgttttagagctacctacactcgacatcggtagctattttttttcagccaactccaatttttttttagctaccgatgtcgagtgtagg

SEQ ID NO: 1662 - DNA, 101 bp, synthetic construct
  source 1..101: mol_type = other DNA
gtagccttgggcgcgttttagagctacctacactcgacatcggtagctattttttttcagccaactccaatttttttttagctaccgatgtcgagtgtagg

SEQ ID NO: 1663 - DNA, 101 bp, synthetic construct
  source 1..101: mol_type = other DNA
gcgtcctctcccacgttttagagctacctacactcgacatcggtagctattttttttcagccaactccaatttttttttagctaccgatgtcgagtgtagg

SEQ ID NO: 1664 - DNA, 102 bp, synthetic construct
  source 1..102: mol_type = other DNA
gcccgcagtgtcactgttttagagctacctacactcgacatcggtagctattttttttcagccaactccaatttttttttagctaccgatgtcgagtgtagg

SEQ ID NO: 1665 - DNA, 102 bp, synthetic construct
  source 1..102: mol_type = other DNA
gttaggcccacgcccgttttagagctaccctggcggaacgttcgagtaatttttttttcagccaactccaattttttttattactcgaacgttccgccaggg

SEQ ID NO: 1666 - DNA, 101 bp, synthetic construct
  source 1..101: mol_type = other DNA
gtagccttgggcgcgttttagagctaccctggcggaacgttcgagtaatttttttttcagccaactccaattttttttattactcgaacgttccgccaggg

SEQ ID NO: 1667 - DNA, 101 bp, synthetic construct
  source 1..101: mol_type = other DNA
gcgtcctctcccacgttttagagctaccctggcggaacgttcgagtaatttttttttcagccaactccaattttttttattactcgaacgttccgccaggg

SEQ ID NO: 1668 - DNA, 102 bp, synthetic construct
  source 1..102: mol_type = other DNA
gcccgcagtgtcactgttttagagctaccctggcggaacgttcgagtaatttttttttcagccaactccaattttttttattactcgaacgttccgccaggg

SEQ ID NO: 1669 - DNA, 102 bp, synthetic construct
  source 1..102: mol_type = other DNA
gttaggcccacgcccgttttagagctacctacacgatagtggtcgtgcgcttttttttcagccaactccaattttttttgcgcacgaccactatcgtgtagg

SEQ ID NO: 1670 - DNA, 101 bp, synthetic construct
  source 1..101: mol_type = other DNA
gtagccttgggcgcgttttagagctacctacacgatagtggtcgtgcgcttttttttcagccaactccaattttttttgcgcacgaccactatcgtgtagg

SEQ ID NO: 1671 - DNA, 101 bp, synthetic construct
  source 1..101: mol_type = other DNA
gcgtcctctcccacgttttagagctacctacacgatagtggtcgtgcgcttttttttcagccaactccaattttttttgcgcacgaccactatcgtgtagg

SEQ ID NO: 1672 - DNA, 102 bp, synthetic construct
  source 1..102: mol_type = other DNA
gcccgcagtgtcactgttttagagctacctacacgatagtggtcgtgcgcttttttttcagccaactccaattttttttgcgcacgaccactatcgtgtagg

SEQ ID NO: 1673 - DNA, 104 bp, synthetic construct
  source 1..104: mol_type = other DNA
gttaggcccacgcccgttttagagctaccttcccgacttccgtaggagcgcttttttttcagccaactccaattttttttgcgctcctacggaagtcgggaagg

SEQ ID NO: 1674 - DNA, 103 bp, synthetic construct
  source 1..103: mol_type = other DNA
gtagccttgggcgcgttttagagctaccttcccgacttccgtaggagcgcttttttttcagccaactccaattttttttgcgctcctacggaagtcgggaagg

SEQ ID NO: 1675 - DNA, 103 bp, synthetic construct
  source 1..103: mol_type = other DNA
gcgtcctctcccacgttttagagctaccttcccgacttccgtaggagcgcttttttttcagccaactccaattttttttgcgctcctacggaagtcgggaagg

SEQ ID NO: 1676 - DNA, 104 bp, synthetic construct
  source 1..104: mol_type = other DNA
gcccgcagtgtcactgttttagagctaccttcccgacttccgtaggagcgcttttttttcagccaactccaattttttttgcgctcctacggaagtcgggaagg

SEQ ID NO: 1677 - DNA, 104 bp, synthetic construct
  source 1..104: mol_type = other DNA
gttaggcccacgcccgttttagagctacctgaaggtaaagatcgggtcctcttttttttcagccaactccaattttttttgaggacccgatctttaccttcagg

SEQ ID NO: 1678 - DNA, 103 bp, synthetic construct
  source 1..103: mol_type = other DNA
gtagccttgggcgcgttttagagctacctgaaggtaaagatcgggtcctcttttttttcagccaactccaattttttttgaggacccgatctttaccttcagg

SEQ ID NO: 1679 - DNA, 103 bp, synthetic construct
  source 1..103: mol_type = other DNA
gcgtcctctcccacgttttagagctacctgaaggtaaagatcgggtcctcttttttttcagccaactccaattttttttgaggacccgatctttaccttcagg

SEQ ID NO: 1680 - DNA, 104 bp, synthetic construct
  source 1..104: mol_type = other DNA
gcccgcagtgtcactgttttagagctacctgaaggtaaagatcgggtcctcttttttttcagccaactccaattttttttgaggacccgatctttaccttcagg

SEQ ID NO: 1681 - DNA, 102 bp, synthetic construct
  source 1..102: mol_type = other DNA
gttaggcccacgcccgttttagagctacctggttatagcggacgcactgtttttttttcagccaactccaattttttttacagtgcgtccgctataaccagg

SEQ ID NO: 1682 - DNA, 101 bp, synthetic construct
  source 1..101: mol_type = other DNA
gtagccttgggcgcgttttagagctacctggttatagcggacgcactgtttttttttcagccaactccaattttttttacagtgcgtccgctataaccagg

SEQ ID NO: 1683 - DNA, 101 bp, synthetic construct
  source 1..101: mol_type = other DNA
gcgtcctctcccacgttttagagctacctggttatagcggacgcactgtttttttttcagccaactccaattttttttacagtgcgtccgctataaccagg

SEQ ID NO: 1684 - DNA, 102 bp, synthetic construct
  source 1..102: mol_type = other DNA
gcccgcagtgtcactgttttagagctacctggttatagcggacgcactgtttttttttcagccaactccaattttttttacagtgcgtccgctataaccagg

SEQ ID NO: 1685 - DNA, 102 bp, synthetic construct
  source 1..102: mol_type = other DNA
gttaggcccacgcccgttttagagctaccgcatcgtattatctgcgaagcttttttttcagccaactccaattttttttgcttcgcagataatacgatgcgg

SEQ ID NO: 1686 - DNA, 101 bp, synthetic construct
  source 1..101: mol_type = other DNA
gtagccttgggcgcgttttagagctaccgcatcgtattatctgcgaagcttttttttcagccaactccaattttttttgcttcgcagataatacgatgcgg

SEQ ID NO: 1687 - DNA, 101 bp, synthetic construct
  source 1..101: mol_type = other DNA
gcgtcctctcccacgttttagagctaccgcatcgtattatctgcgaagcttttttttcagccaactccaattttttttgcttcgcagataatacgatgcgg

SEQ ID NO: 1688 - DNA, 102 bp, synthetic construct
  source 1..102: mol_type = other DNA
gcccgcagtgtcactgttttagagctaccgcatcgtattatctgcgaagcttttttttcagccaactccaattttttttgcttcgcagataatacgatgcgg

SEQ ID NO: 1689 - DNA, 102 bp, synthetic construct
  source 1..102: mol_type = other DNA
gttaggcccacgcccgttttagagctaccgctaggacgttcaacggagtcttttttttcagccaactccaattttttttgactccgttgaacgtcctagcgg

SEQ ID NO: 1690 - DNA, 101 bp, synthetic construct
  source 1..101: mol_type = other DNA
gtagccttgggcgcgttttagagctaccgctaggacgttcaacggagtcttttttttcagccaactccaattttttttgactccgttgaacgtcctagcgg

SEQ ID NO: 1691 - DNA, 101 bp, synthetic construct
  source 1..101: mol_type = other DNA
gcgtcctctcccacgttttagagctaccgctaggacgttcaacggagtcttttttttcagccaactccaattttttttgactccgttgaacgtcctagcgg

SEQ ID NO: 1692 - DNA, 102 bp, synthetic construct
  source 1..102: mol_type = other DNA
gcccgcagtgtcactgttttagagctaccgctaggacgttcaacggagtcttttttttcagccaactccaattttttttgactccgttgaacgtcctagcgg

SEQ ID NO: 1693 - DNA, 102 bp, synthetic construct
  source 1..102: mol_type = other DNA
gttaggcccacgcccgttttagagctaccatagcggtactatcggcatctttttttttcagccaactccaattttttttagatgccgatagtaccgctatgg

SEQ ID NO: 1694 - DNA, 101 bp, synthetic construct
  source 1..101: mol_type = other DNA
gtagccttgggcgcgttttagagctaccatagcggtactatcggcatctttttttttcagccaactccaattttttttagatgccgatagtaccgctatgg

SEQ ID NO: 1695 - DNA, 101 bp, synthetic construct
  source 1..101: mol_type = other DNA
gcgtcctctcccacgttttagagctaccatagcggtactatcggcatctttttttttcagccaactccaattttttttagatgccgatagtaccgctatgg

SEQ ID NO: 1696 - DNA, 102 bp, synthetic construct
  source 1..102: mol_type = other DNA
gcccgcagtgtcactgttttagagctaccatagcggtactatcggcatctttttttttcagccaactccaattttttttagatgccgatagtaccgctatgg

SEQ ID NO: 1697 - DNA, 102 bp, synthetic construct
  source 1..102: mol_type = other DNA
gttaggcccacgcccgttttagagctacctcgtactagtctcgcatgaccttttttttcagccaactccaattttttttggtcatgcgagactagtacgagg

SEQ ID NO: 1698 - DNA, 101 bp, synthetic construct
  source 1..101: mol_type = other DNA
gtagccttgggcgcgttttagagctacctcgtactagtctcgcatgaccttttttttcagccaactccaattttttttggtcatgcgagactagtacgagg

SEQ ID NO: 1699 - DNA, 101 bp, synthetic construct
  source 1..101: mol_type = other DNA
gcgtcctctcccacgttttagagctacctcgtactagtctcgcatgaccttttttttcagccaactccaattttttttggtcatgcgagactagtacgagg

SEQ ID NO: 1700 - DNA, 102 bp, synthetic construct
  source 1..102: mol_type = other DNA
gcccgcagtgtcactgttttagagctacctcgtactagtctcgcatgaccttttttttcagccaactccaattttttttggtcatgcgagactagtacgagg

SEQ ID NO: 1701 - DNA, 102 bp, synthetic construct
  source 1..102: mol_type = other DNA
gttaggcccacgcccgttttagagctaccgatagtgctaaacgacgctttttttttttcagccaactccaattttttttaaagcgtcgtttagcactatcgg

SEQ ID NO: 1702 - DNA, 101 bp, synthetic construct
  source 1..101: mol_type = other DNA
gtagccttgggcgcgttttagagctaccgatagtgctaaacgacgctttttttttttcagccaactccaattttttttaaagcgtcgtttagcactatcgg

SEQ ID NO: 1703 - DNA, 101 bp, synthetic construct
  source 1..101: mol_type = other DNA
gcgtcctctcccacgttttagagctaccgatagtgctaaacgacgctttttttttttcagccaactccaattttttttaaagcgtcgtttagcactatcgg

SEQ ID NO: 1704 - DNA, 102 bp, synthetic construct
  source 1..102: mol_type = other DNA
gcccgcagtgtcactgttttagagctaccgatagtgctaaacgacgctttttttttttcagccaactccaattttttttaaagcgtcgtttagcactatcgg

SEQ ID NO: 1705 - DNA, 102 bp, synthetic construct
  source 1..102: mol_type = other DNA
gttaggcccacgcccgttttagagctacccgttatcgacgttcaaggaacttttttttcagccaactccaattttttttgttccttgaacgtcgataacggg

SEQ ID NO: 1706 - DNA, 101 bp, synthetic construct
  source 1..101: mol_type = other DNA
gtagccttgggcgcgttttagagctacccgttatcgacgttcaaggaacttttttttcagccaactccaattttttttgttccttgaacgtcgataacggg

SEQ ID NO: 1707 - DNA, 101 bp, synthetic construct
  source 1..101: mol_type = other DNA
gcgtcctctcccacgttttagagctacccgttatcgacgttcaaggaacttttttttcagccaactccaattttttttgttccttgaacgtcgataacggg

SEQ ID NO: 1708 - DNA, 102 bp, synthetic construct
  source 1..102: mol_type = other DNA
gcccgcagtgtcactgttttagagctacccgttatcgacgttcaaggaacttttttttcagccaactccaattttttttgttccttgaacgtcgataacggg

SEQ ID NO: 1709 - DNA, 102 bp, synthetic construct
  source 1..102: mol_type = other DNA
gttaggcccacgcccgttttagagctaccgatcaatgcggtctgcgtaacttttttttcagccaactccaattttttttgttacgcagaccgcattgatcgg

SEQ ID NO: 1710 - DNA, 101 bp, synthetic construct
  source 1..101: mol_type = other DNA
gtagccttgggcgcgttttagagctaccgatcaatgcggtctgcgtaacttttttttcagccaactccaattttttttgttacgcagaccgcattgatcgg

SEQ ID NO: 1711 - DNA, 101 bp, synthetic construct
  source 1..101: mol_type = other DNA
gcgtcctctcccacgttttagagctaccgatcaatgcggtctgcgtaacttttttttcagccaactccaattttttttgttacgcagaccgcattgatcgg

SEQ ID NO: 1712 - DNA, 102 bp, synthetic construct
  source 1..102: mol_type = other DNA
gcccgcagtgtcactgttttagagctaccgatcaatgcggtctgcgtaacttttttttcagccaactccaattttttttgttacgcagaccgcattgatcgg

SEQ ID NO: 1713 - DNA, 102 bp, synthetic construct
  source 1..102: mol_type = other DNA
gttaggcccacgcccgttttagagctacccttactcgcgatactctcgacttttttttcagccaactccaattttttttgtcgagagtatcgcgagtaaggg

SEQ ID NO: 1714 - DNA, 101 bp, synthetic construct
  source 1..101: mol_type = other DNA
gtagccttgggcgcgttttagagctacccttactcgcgatactctcgacttttttttcagccaactccaattttttttgtcgagagtatcgcgagtaaggg

SEQ ID NO: 1715 - DNA, 101 bp, synthetic construct
  source 1..101: mol_type = other DNA
gcgtcctctcccacgttttagagctacccttactcgcgatactctcgacttttttttcagccaactccaattttttttgtcgagagtatcgcgagtaaggg

SEQ ID NO: 1716 - DNA, 102 bp, synthetic construct
  source 1..102: mol_type = other DNA
gcccgcagtgtcactgttttagagctacccttactcgcgatactctcgacttttttttcagccaactccaattttttttgtcgagagtatcgcgagtaaggg

SEQ ID NO: 1717 - DNA, 102 bp, synthetic construct
  source 1..102: mol_type = other DNA
gttaggcccacgcccgttttagagctaccgcggacggtaagcacggaatattttttttcagccaactccaatttttttttattccgtgcttaccgtccgcgg

SEQ ID NO: 1718 - DNA, 101 bp, synthetic construct
  source 1..101: mol_type = other DNA
gtagccttgggcgcgttttagagctaccgcggacggtaagcacggaatattttttttcagccaactccaatttttttttattccgtgcttaccgtccgcgg

SEQ ID NO: 1719 - DNA, 101 bp, synthetic construct
  source 1..101: mol_type = other DNA
gcgtcctctcccacgttttagagctaccgcggacggtaagcacggaatattttttttcagccaactccaatttttttttattccgtgcttaccgtccgcgg

SEQ ID NO: 1720 - DNA, 102 bp, synthetic construct
  source 1..102: mol_type = other DNA
gcccgcagtgtcactgttttagagctaccgcggacggtaagcacggaatattttttttcagccaactccaatttttttttattccgtgcttaccgtccgcgg

SEQ ID NO: 1721 - DNA, 102 bp, synthetic construct
  source 1..102: mol_type = other DNA
gttaggcccacgcccgttttagagctacctatagtcacgaatcgtagggtttttttttcagccaactccaattttttttaccctacgattcgtgactatagg

SEQ ID NO: 1722 - DNA, 101 bp, synthetic construct
  source 1..101: mol_type = other DNA
gtagccttgggcgcgttttagagctacctatagtcacgaatcgtagggtttttttttcagccaactccaattttttttaccctacgattcgtgactatagg

SEQ ID NO: 1723 - DNA, 101 bp, synthetic construct
  source 1..101: mol_type = other DNA
gcgtcctctcccacgttttagagctacctatagtcacgaatcgtagggtttttttttcagccaactccaattttttttaccctacgattcgtgactatagg

SEQ ID NO: 1724 - DNA, 102 bp, synthetic construct
  source 1..102: mol_type = other DNA
gcccgcagtgtcactgttttagagctacctatagtcacgaatcgtagggtttttttttcagccaactccaattttttttaccctacgattcgtgactatagg

SEQ ID NO: 1725 - DNA, 102 bp, synthetic construct
  source 1..102: mol_type = other DNA
gttaggcccacgcccgttttagagctacccgtcgtcacgtatgcgtagcattttttttcagccaactccaatttttttttgctacgcatacgtgacgacggg

SEQ ID NO: 1726 - DNA, 101 bp, synthetic construct
  source 1..101: mol_type = other DNA
gtagccttgggcgcgttttagagctacccgtcgtcacgtatgcgtagcattttttttcagccaactccaatttttttttgctacgcatacgtgacgacggg

SEQ ID NO: 1727 - DNA, 101 bp, synthetic construct
  source 1..101: mol_type = other DNA
gcgtcctctcccacgttttagagctacccgtcgtcacgtatgcgtagcattttttttcagccaactccaatttttttttgctacgcatacgtgacgacggg

SEQ ID NO: 1728 - DNA, 102 bp, synthetic construct
  source 1..102: mol_type = other DNA
gcccgcagtgtcactgttttagagctacccgtcgtcacgtatgcgtagcattttttttcagccaactccaatttttttttgctacgcatacgtgacgacggg

SEQ ID NO: 1729 - DNA, 102 bp, synthetic construct
  source 1..102: mol_type = other DNA
gttaggcccacgcccgttttagagctacccgagaggtagtagacgacgcattttttttcagccaactccaatttttttttgcgtcgtctactacctctcggg

SEQ ID NO: 1730 - DNA, 101 bp, synthetic construct
  source 1..101: mol_type = other DNA
gtagccttgggcgcgttttagagctacccgagaggtagtagacgacgcattttttttcagccaactccaatttttttttgcgtcgtctactacctctcggg

SEQ ID NO: 1731 - DNA, 101 bp, synthetic construct
  source 1..101: mol_type = other DNA
gcgtcctctcccacgttttagagctacccgagaggtagtagacgacgcattttttttcagccaactccaatttttttttgcgtcgtctactacctctcggg

SEQ ID NO: 1732 - DNA, 102 bp, synthetic construct
  source 1..102: mol_type = other DNA
gcccgcagtgtcactgttttagagctacccgagaggtagtagacgacgcattttttttcagccaactccaatttttttttgcgtcgtctactacctctcggg

SEQ ID NO: 1733 - DNA, 102 bp, synthetic construct
  source 1..102: mol_type = other DNA
gttaggcccacgcccgttttagagctaccgacgtctacggacgggagctattttttttcagccaactccaatttttttttagctcccgtccgtagacgtcgg

SEQ ID NO: 1734 - DNA, 101 bp, synthetic construct
  source 1..101: mol_type = other DNA
gtagccttgggcgcgttttagagctaccgacgtctacggacgggagctattttttttcagccaactccaatttttttttagctcccgtccgtagacgtcgg

SEQ ID NO: 1735 - DNA, 101 bp, synthetic construct
  source 1..101: mol_type = other DNA
gcgtcctctcccacgttttagagctaccgacgtctacggacgggagctattttttttcagccaactccaatttttttttagctcccgtccgtagacgtcgg

SEQ ID NO: 1736 - DNA, 102 bp, synthetic construct
  source 1..102: mol_type = other DNA
gcccgcagtgtcactgttttagagctaccgacgtctacggacgggagctattttttttcagccaactccaatttttttttagctcccgtccgtagacgtcgg

SEQ ID NO: 1737 - DNA, 102 bp, synthetic construct
  source 1..102: mol_type = other DNA
gttaggcccacgcccgttttagagctaccaaagctcattcgcgactgagcttttttttcagccaactccaattttttttgctcagtcgcgaatgagctttgg

SEQ ID NO: 1738 - DNA, 101 bp, synthetic construct
  source 1..101: mol_type = other DNA
gtagccttgggcgcgttttagagctaccaaagctcattcgcgactgagcttttttttcagccaactccaattttttttgctcagtcgcgaatgagctttgg

SEQ ID NO: 1739 - DNA, 101 bp, synthetic construct
  source 1..101: mol_type = other DNA
gcgtcctctcccacgttttagagctaccaaagctcattcgcgactgagcttttttttcagccaactccaattttttttgctcagtcgcgaatgagctttgg

SEQ ID NO: 1740 - DNA, 102 bp, synthetic construct
  source 1..102: mol_type = other DNA
gcccgcagtgtcactgttttagagctaccaaagctcattcgcgactgagcttttttttcagccaactccaattttttttgctcagtcgcgaatgagctttgg

SEQ ID NO: 1741 - DNA, 102 bp, synthetic construct
  source 1..102: mol_type = other DNA
gttaggcccacgcccgttttagagctaccatggcacgatcgacacggaggttttttttcagccaactccaattttttttcctccgtgtcgatcgtgccatgg

SEQ ID NO: 1742 - DNA, 101 bp, synthetic construct
  source 1..101: mol_type = other DNA
gtagccttgggcgcgttttagagctaccatggcacgatcgacacggaggttttttttcagccaactccaattttttttcctccgtgtcgatcgtgccatgg

SEQ ID NO: 1743 - DNA, 101 bp, synthetic construct
  source 1..101: mol_type = other DNA
gcgtcctctcccacgttttagagctaccatggcacgatcgacacggaggttttttttcagccaactccaattttttttcctccgtgtcgatcgtgccatgg

SEQ ID NO: 1744 - DNA, 102 bp, synthetic construct
  source 1..102: mol_type = other DNA
gcccgcagtgtcactgttttagagctaccatggcacgatcgacacggaggttttttttcagccaactccaattttttttcctccgtgtcgatcgtgccatgg

SEQ ID NO: 1745 - DNA, 102 bp, synthetic construct
  source 1..102: mol_type = other DNA
gttaggcccacgcccgttttagagctacccgaactctctatcgaacgagtttttttttcagccaactccaattttttttactcgttcgatagagagttcggg

SEQ ID NO: 1746 - DNA, 101 bp, synthetic construct
  source 1..101: mol_type = other DNA
gtagccttgggcgcgttttagagctacccgaactctctatcgaacgagtttttttttcagccaactccaattttttttactcgttcgatagagagttcggg

SEQ ID NO: 1747 - DNA, 101 bp, synthetic construct
  source 1..101: mol_type = other DNA
gcgtcctctcccacgttttagagctacccgaactctctatcgaacgagtttttttttcagccaactccaattttttttactcgttcgatagagagttcggg

SEQ ID NO: 1748 - DNA, 102 bp, synthetic construct
  source 1..102: mol_type = other DNA
gcccgcagtgtcactgttttagagctacccgaactctctatcgaacgagtttttttttcagccaactccaattttttttactcgttcgatagagagttcggg

SEQ ID NO: 1749 - DNA, 104 bp, synthetic construct
  source 1..104: mol_type = other DNA
gcaaacttacacactgttttagagctaccgtcgttgtaccgtctacttgacttttttttcagccaactccaattttttttgtcaagtagacggtacaacgacgg

SEQ ID NO: 1750 - DNA, 104 bp, synthetic construct
  source 1..104: mol_type = other DNA
gaaagggcggacggtgttttagagctaccgtcgttgtaccgtctacttgacttttttttcagccaactccaattttttttgtcaagtagacggtacaacgacgg

SEQ ID NO: 1751 - DNA, 104 bp, synthetic construct
  source 1..104: mol_type = other DNA
gattggacccgatttgttttagagctaccgtcgttgtaccgtctacttgacttttttttcagccaactccaattttttttgtcaagtagacggtacaacgacgg

SEQ ID NO: 1752 - DNA, 103 bp, synthetic construct
  source 1..103: mol_type = other DNA
gtggctctaaggtggttttagagctaccgtcgttgtaccgtctacttgacttttttttcagccaactccaattttttttgtcaagtagacggtacaacgacgg

SEQ ID NO: 1753 - DNA, 102 bp, synthetic construct
  source 1..102: mol_type = other DNA
gcaaacttacacactgttttagagctacctacactcgacatcggtagctattttttttcagccaactccaatttttttttagctaccgatgtcgagtgtagg

SEQ ID NO: 1754 - DNA, 102 bp, synthetic construct
  source 1..102: mol_type = other DNA
gaaagggcggacggtgttttagagctacctacactcgacatcggtagctattttttttcagccaactccaatttttttttagctaccgatgtcgagtgtagg

SEQ ID NO: 1755 - DNA, 102 bp, synthetic construct
  source 1..102: mol_type = other DNA
gattggacccgatttgttttagagctacctacactcgacatcggtagctattttttttcagccaactccaatttttttttagctaccgatgtcgagtgtagg

SEQ ID NO: 1756 - DNA, 101 bp, synthetic construct
  source 1..101: mol_type = other DNA
gtggctctaaggtggttttagagctacctacactcgacatcggtagctattttttttcagccaactccaatttttttttagctaccgatgtcgagtgtagg

SEQ ID NO: 1757 - DNA, 102 bp, synthetic construct
  source 1..102: mol_type = other DNA
gcaaacttacacactgttttagagctaccctggcggaacgttcgagtaatttttttttcagccaactccaattttttttattactcgaacgttccgccaggg

SEQ ID NO: 1758 - DNA, 102 bp, synthetic construct
  source 1..102: mol_type = other DNA
gaaagggcggacggtgttttagagctaccctggcggaacgttcgagtaatttttttttcagccaactccaattttttttattactcgaacgttccgccaggg

SEQ ID NO: 1759 - DNA, 102 bp, synthetic construct
  source 1..102: mol_type = other DNA
gattggacccgatttgttttagagctaccctggcggaacgttcgagtaatttttttttcagccaactccaattttttttattactcgaacgttccgccaggg

SEQ ID NO: 1760 - DNA, 101 bp, synthetic construct
  source 1..101: mol_type = other DNA
gtggctctaaggtggttttagagctaccctggcggaacgttcgagtaatttttttttcagccaactccaattttttttattactcgaacgttccgccaggg

SEQ ID NO: 1761 - DNA, 102 bp, synthetic construct
  source 1..102: mol_type = other DNA
gcaaacttacacactgttttagagctacctacacgatagtggtcgtgcgcttttttttcagccaactccaattttttttgcgcacgaccactatcgtgtagg

SEQ ID NO: 1762 - DNA, 102 bp, synthetic construct
  source 1..102: mol_type = other DNA
gaaagggcggacggtgttttagagctacctacacgatagtggtcgtgcgcttttttttcagccaactccaattttttttgcgcacgaccactatcgtgtagg

SEQ ID NO: 1763 - DNA, 102 bp, synthetic construct
  source 1..102: mol_type = other DNA
gattggacccgatttgttttagagctacctacacgatagtggtcgtgcgcttttttttcagccaactccaattttttttgcgcacgaccactatcgtgtagg

SEQ ID NO: 1764 - DNA, 101 bp, synthetic construct
  source 1..101: mol_type = other DNA
gtggctctaaggtggttttagagctacctacacgatagtggtcgtgcgcttttttttcagccaactccaattttttttgcgcacgaccactatcgtgtagg

SEQ ID NO: 1765 - DNA, 104 bp, synthetic construct
  source 1..104: mol_type = other DNA
gcaaacttacacactgttttagagctaccttcccgacttccgtaggagcgcttttttttcagccaactccaattttttttgcgctcctacggaagtcgggaagg

SEQ ID NO: 1766 - DNA, 104 bp, synthetic construct
  source 1..104: mol_type = other DNA
gaaagggcggacggtgttttagagctaccttcccgacttccgtaggagcgcttttttttcagccaactccaattttttttgcgctcctacggaagtcgggaagg

SEQ ID NO: 1767 - DNA, 104 bp, synthetic construct
  source 1..104: mol_type = other DNA
gattggacccgatttgttttagagctaccttcccgacttccgtaggagcgcttttttttcagccaactccaattttttttgcgctcctacggaagtcgggaagg

SEQ ID NO: 1768 - DNA, 103 bp, synthetic construct
  source 1..103: mol_type = other DNA
gtggctctaaggtggttttagagctaccttcccgacttccgtaggagcgcttttttttcagccaactccaattttttttgcgctcctacggaagtcgggaagg

SEQ ID NO: 1769 - DNA, 104 bp, synthetic construct
  source 1..104: mol_type = other DNA
gcaaacttacacactgttttagagctacctgaaggtaaagatcgggtcctcttttttttcagccaactccaattttttttgaggacccgatctttaccttcagg

SEQ ID NO: 1770 - DNA, 104 bp, synthetic construct
  source 1..104: mol_type = other DNA
gaaagggcggacggtgttttagagctacctgaaggtaaagatcgggtcctcttttttttcagccaactccaattttttttgaggacccgatctttaccttcagg

SEQ ID NO: 1771 - DNA, 104 bp, synthetic construct
  source 1..104: mol_type = other DNA
gattggacccgatttgttttagagctacctgaaggtaaagatcgggtcctcttttttttcagccaactccaattttttttgaggacccgatctttaccttcagg

SEQ ID NO: 1772 - DNA, 103 bp, synthetic construct
  source 1..103: mol_type = other DNA
gtggctctaaggtggttttagagctacctgaaggtaaagatcgggtcctcttttttttcagccaactccaattttttttgaggacccgatctttaccttcagg

SEQ ID NO: 1773 - DNA, 102 bp, synthetic construct
  source 1..102: mol_type = other DNA
gcaaacttacacactgttttagagctacctggttatagcggacgcactgtttttttttcagccaactccaattttttttacagtgcgtccgctataaccagg

SEQ ID NO: 1774 - DNA, 102 bp, synthetic construct
  source 1..102: mol_type = other DNA
gaaagggcggacggtgttttagagctacctggttatagcggacgcactgtttttttttcagccaactccaattttttttacagtgcgtccgctataaccagg

SEQ ID NO: 1775 - DNA, 102 bp, synthetic construct
  source 1..102: mol_type = other DNA
gattggacccgatttgttttagagctacctggttatagcggacgcactgtttttttttcagccaactccaattttttttacagtgcgtccgctataaccagg

SEQ ID NO: 1776 - DNA, 101 bp, synthetic construct
  source 1..101: mol_type = other DNA
gtggctctaaggtggttttagagctacctggttatagcggacgcactgtttttttttcagccaactccaattttttttacagtgcgtccgctataaccagg

SEQ ID NO: 1777 - DNA, 102 bp, synthetic construct
  source 1..102: mol_type = other DNA
gcaaacttacacactgttttagagctaccgcatcgtattatctgcgaagcttttttttcagccaactccaattttttttgcttcgcagataatacgatgcgg

SEQ ID NO: 1778 - DNA, 102 bp, synthetic construct
  source 1..102: mol_type = other DNA
gaaagggcggacggtgttttagagctaccgcatcgtattatctgcgaagcttttttttcagccaactccaattttttttgcttcgcagataatacgatgcgg

SEQ ID NO: 1779 - DNA, 102 bp, synthetic construct
  source 1..102: mol_type = other DNA
gattggacccgatttgttttagagctaccgcatcgtattatctgcgaagcttttttttcagccaactccaattttttttgcttcgcagataatacgatgcgg

SEQ ID NO: 1780 - DNA, 101 bp, synthetic construct
  source 1..101: mol_type = other DNA
gtggctctaaggtggttttagagctaccgcatcgtattatctgcgaagcttttttttcagccaactccaattttttttgcttcgcagataatacgatgcgg

SEQ ID NO: 1781 - DNA, 102 bp, synthetic construct
  source 1..102: mol_type = other DNA
gcaaacttacacactgttttagagctaccgctaggacgttcaacggagtcttttttttcagccaactccaattttttttgactccgttgaacgtcctagcgg

SEQ ID NO: 1782 - DNA, 102 bp, synthetic construct
  source 1..102: mol_type = other DNA
gaaagggcggacggtgttttagagctaccgctaggacgttcaacggagtcttttttttcagccaactccaattttttttgactccgttgaacgtcctagcgg

SEQ ID NO: 1783 - DNA, 102 bp, synthetic construct
  source 1..102: mol_type = other DNA
gattggacccgatttgttttagagctaccgctaggacgttcaacggagtcttttttttcagccaactccaattttttttgactccgttgaacgtcctagcgg

SEQ ID NO: 1784 - DNA, 101 bp, synthetic construct
  source 1..101: mol_type = other DNA
gtggctctaaggtggttttagagctaccgctaggacgttcaacggagtcttttttttcagccaactccaattttttttgactccgttgaacgtcctagcgg

SEQ ID NO: 1785 - DNA, 102 bp, synthetic construct
  source 1..102: mol_type = other DNA
gcaaacttacacactgttttagagctaccatagcggtactatcggcatctttttttttcagccaactccaattttttttagatgccgatagtaccgctatgg

SEQ ID NO: 1786 - DNA, 102 bp, synthetic construct
  source 1..102: mol_type = other DNA
gaaagggcggacggtgttttagagctaccatagcggtactatcggcatctttttttttcagccaactccaattttttttagatgccgatagtaccgctatgg

SEQ ID NO: 1787 - DNA, 102 bp, synthetic construct
  source 1..102: mol_type = other DNA
gattggacccgatttgttttagagctaccatagcggtactatcggcatctttttttttcagccaactccaattttttttagatgccgatagtaccgctatgg

SEQ ID NO: 1788 - DNA, 101 bp, synthetic construct
  source 1..101: mol_type = other DNA
gtggctctaaggtggttttagagctaccatagcggtactatcggcatctttttttttcagccaactccaattttttttagatgccgatagtaccgctatgg

SEQ ID NO: 1789 - DNA, 102 bp, synthetic construct
  source 1..102: mol_type = other DNA
gcaaacttacacactgttttagagctacctcgtactagtctcgcatgaccttttttttcagccaactccaattttttttggtcatgcgagactagtacgagg

SEQ ID NO: 1790 - DNA, 102 bp, synthetic construct
  source 1..102: mol_type = other DNA
gaaagggcggacggtgttttagagctacctcgtactagtctcgcatgaccttttttttcagccaactccaattttttttggtcatgcgagactagtacgagg

SEQ ID NO: 1791 - DNA, 102 bp, synthetic construct
  source 1..102: mol_type = other DNA
gattggacccgatttgttttagagctacctcgtactagtctcgcatgaccttttttttcagccaactccaattttttttggtcatgcgagactagtacgagg

SEQ ID NO: 1792 - DNA, 101 bp, synthetic construct
  source 1..101: mol_type = other DNA
gtggctctaaggtggttttagagctacctcgtactagtctcgcatgaccttttttttcagccaactccaattttttttggtcatgcgagactagtacgagg

SEQ ID NO: 1793 - DNA, 102 bp, synthetic construct
  source 1..102: mol_type = other DNA
gcaaacttacacactgttttagagctaccgatagtgctaaacgacgctttttttttttcagccaactccaattttttttaaagcgtcgtttagcactatcgg

SEQ ID NO: 1794 - DNA, 102 bp, synthetic construct
  source 1..102: mol_type = other DNA
gaaagggcggacggtgttttagagctaccgatagtgctaaacgacgctttttttttttcagccaactccaattttttttaaagcgtcgtttagcactatcgg

SEQ ID NO: 1795 - DNA, 102 bp, synthetic construct
  source 1..102: mol_type = other DNA
gattggacccgatttgttttagagctaccgatagtgctaaacgacgctttttttttttcagccaactccaattttttttaaagcgtcgtttagcactatcgg

SEQ ID NO: 1796 - DNA, 101 bp, synthetic construct
  source 1..101: mol_type = other DNA
gtggctctaaggtggttttagagctaccgatagtgctaaacgacgctttttttttttcagccaactccaattttttttaaagcgtcgtttagcactatcgg

SEQ ID NO: 1797 - DNA, 102 bp, synthetic construct
  source 1..102: mol_type = other DNA
gcaaacttacacactgttttagagctacccgttatcgacgttcaaggaacttttttttcagccaactccaattttttttgttccttgaacgtcgataacggg

SEQ ID NO: 1798 - DNA, 102 bp, synthetic construct
  source 1..102: mol_type = other DNA
gaaagggcggacggtgttttagagctacccgttatcgacgttcaaggaacttttttttcagccaactccaattttttttgttccttgaacgtcgataacggg

SEQ ID NO: 1799 - DNA, 102 bp, synthetic construct
  source 1..102: mol_type = other DNA
gattggacccgatttgttttagagctacccgttatcgacgttcaaggaacttttttttcagccaactccaattttttttgttccttgaacgtcgataacggg

SEQ ID NO: 1800 - DNA, 101 bp, synthetic construct
  source 1..101: mol_type = other DNA
gtggctctaaggtggttttagagctacccgttatcgacgttcaaggaacttttttttcagccaactccaattttttttgttccttgaacgtcgataacggg

SEQ ID NO: 1801 - DNA, 102 bp, synthetic construct
  source 1..102: mol_type = other DNA
gcaaacttacacactgttttagagctaccgatcaatgcggtctgcgtaacttttttttcagccaactccaattttttttgttacgcagaccgcattgatcgg

SEQ ID NO: 1802 - DNA, 102 bp, synthetic construct
  source 1..102: mol_type = other DNA
gaaagggcggacggtgttttagagctaccgatcaatgcggtctgcgtaacttttttttcagccaactccaattttttttgttacgcagaccgcattgatcgg

SEQ ID NO: 1803 - DNA, 102 bp, synthetic construct
  source 1..102: mol_type = other DNA
gattggacccgatttgttttagagctaccgatcaatgcggtctgcgtaacttttttttcagccaactccaattttttttgttacgcagaccgcattgatcgg

SEQ ID NO: 1804 - DNA, 101 bp, synthetic construct
  source 1..101: mol_type = other DNA
gtggctctaaggtggttttagagctaccgatcaatgcggtctgcgtaacttttttttcagccaactccaattttttttgttacgcagaccgcattgatcgg

SEQ ID NO: 1805 - DNA, 102 bp, synthetic construct
  source 1..102: mol_type = other DNA
gcaaacttacacactgttttagagctacccttactcgcgatactctcgacttttttttcagccaactccaattttttttgtcgagagtatcgcgagtaaggg

SEQ ID NO: 1806 - DNA, 102 bp, synthetic construct
  source 1..102: mol_type = other DNA
gaaagggcggacggtgttttagagctacccttactcgcgatactctcgacttttttttcagccaactccaattttttttgtcgagagtatcgcgagtaaggg

SEQ ID NO: 1807 - DNA, 102 bp, synthetic construct
  source 1..102: mol_type = other DNA
gattggacccgatttgttttagagctacccttactcgcgatactctcgacttttttttcagccaactccaattttttttgtcgagagtatcgcgagtaaggg

SEQ ID NO: 1808 - DNA, 101 bp, synthetic construct
  source 1..101: mol_type = other DNA
gtggctctaaggtggttttagagctacccttactcgcgatactctcgacttttttttcagccaactccaattttttttgtcgagagtatcgcgagtaaggg

SEQ ID NO: 1809 - DNA, 102 bp, synthetic construct
  source 1..102: mol_type = other DNA
gcaaacttacacactgttttagagctaccgcggacggtaagcacggaatattttttttcagccaactccaatttttttttattccgtgcttaccgtccgcgg

SEQ ID NO: 1810 - DNA, 102 bp, synthetic construct
  source 1..102: mol_type = other DNA
gaaagggcggacggtgttttagagctaccgcggacggtaagcacggaatattttttttcagccaactccaatttttttttattccgtgcttaccgtccgcgg

SEQ ID NO: 1811 - DNA, 102 bp, synthetic construct
  source 1..102: mol_type = other DNA
gattggacccgatttgttttagagctaccgcggacggtaagcacggaatattttttttcagccaactccaatttttttttattccgtgcttaccgtccgcgg

SEQ ID NO: 1812 - DNA, 101 bp, synthetic construct
  source 1..101: mol_type = other DNA
gtggctctaaggtggttttagagctaccgcggacggtaagcacggaatattttttttcagccaactccaatttttttttattccgtgcttaccgtccgcgg

SEQ ID NO: 1813 - DNA, 102 bp, synthetic construct
  source 1..102: mol_type = other DNA
gcaaacttacacactgttttagagctacctatagtcacgaatcgtagggtttttttttcagccaactccaattttttttaccctacgattcgtgactatagg

SEQ ID NO: 1814 - DNA, 102 bp, synthetic construct
  source 1..102: mol_type = other DNA
gaaagggcggacggtgttttagagctacctatagtcacgaatcgtagggtttttttttcagccaactccaattttttttaccctacgattcgtgactatagg

SEQ ID NO: 1815 - DNA, 102 bp, synthetic construct
  source 1..102: mol_type = other DNA
gattggacccgatttgttttagagctacctatagtcacgaatcgtagggtttttttttcagccaactccaattttttttaccctacgattcgtgactatagg

SEQ ID NO: 1816 - DNA, 101 bp, synthetic construct
  source 1..101: mol_type = other DNA
gtggctctaaggtggttttagagctacctatagtcacgaatcgtagggtttttttttcagccaactccaattttttttaccctacgattcgtgactatagg

SEQ ID NO: 1817 - DNA, 102 bp, synthetic construct
  source 1..102: mol_type = other DNA
gcaaacttacacactgttttagagctacccgtcgtcacgtatgcgtagcattttttttcagccaactccaatttttttttgctacgcatacgtgacgacggg

SEQ ID NO: 1818 - DNA, 102 bp, synthetic construct
  source 1..102: mol_type = other DNA
gaaagggcggacggtgttttagagctacccgtcgtcacgtatgcgtagcattttttttcagccaactccaatttttttttgctacgcatacgtgacgacggg

SEQ ID NO: 1819 - DNA, 102 bp, synthetic construct
  source 1..102: mol_type = other DNA
gattggacccgatttgttttagagctacccgtcgtcacgtatgcgtagcattttttttcagccaactccaatttttttttgctacgcatacgtgacgacggg

SEQ ID NO: 1820 - DNA, 101 bp, synthetic construct
  source 1..101: mol_type = other DNA
gtggctctaaggtggttttagagctacccgtcgtcacgtatgcgtagcattttttttcagccaactccaatttttttttgctacgcatacgtgacgacggg

SEQ ID NO: 1821 - DNA, 102 bp, synthetic construct
  source 1..102: mol_type = other DNA
gcaaacttacacactgttttagagctacccgagaggtagtagacgacgcattttttttcagccaactccaatttttttttgcgtcgtctactacctctcggg

SEQ ID NO: 1822 - DNA, 102 bp, synthetic construct
  source 1..102: mol_type = other DNA
gaaagggcggacggtgttttagagctacccgagaggtagtagacgacgcattttttttcagccaactccaatttttttttgcgtcgtctactacctctcggg

SEQ ID NO: 1823 - DNA, 102 bp, synthetic construct
  source 1..102: mol_type = other DNA
gattggacccgatttgttttagagctacccgagaggtagtagacgacgcattttttttcagccaactccaatttttttttgcgtcgtctactacctctcggg

SEQ ID NO: 1824 - DNA, 101 bp, synthetic construct
  source 1..101: mol_type = other DNA
gtggctctaaggtggttttagagctacccgagaggtagtagacgacgcattttttttcagccaactccaatttttttttgcgtcgtctactacctctcggg

SEQ ID NO: 1825 - DNA, 102 bp, synthetic construct
  source 1..102: mol_type = other DNA
gcaaacttacacactgttttagagctaccgacgtctacggacgggagctattttttttcagccaactccaatttttttttagctcccgtccgtagacgtcgg

SEQ ID NO: 1826 - DNA, 102 bp, synthetic construct
  source 1..102: mol_type = other DNA
gaaagggcggacggtgttttagagctaccgacgtctacggacgggagctattttttttcagccaactccaatttttttttagctcccgtccgtagacgtcgg

SEQ ID NO: 1827 - DNA, 102 bp, synthetic construct
  source 1..102: mol_type = other DNA
gattggacccgatttgttttagagctaccgacgtctacggacgggagctattttttttcagccaactccaatttttttttagctcccgtccgtagacgtcgg

SEQ ID NO: 1828 - DNA, 101 bp, synthetic construct
  source 1..101: mol_type = other DNA
gtggctctaaggtggttttagagctaccgacgtctacggacgggagctattttttttcagccaactccaatttttttttagctcccgtccgtagacgtcgg

SEQ ID NO: 1829 - DNA, 102 bp, synthetic construct
  source 1..102: mol_type = other DNA
gcaaacttacacactgttttagagctaccaaagctcattcgcgactgagcttttttttcagccaactccaattttttttgctcagtcgcgaatgagctttgg

SEQ ID NO: 1830 - DNA, 102 bp, synthetic construct
  source 1..102: mol_type = other DNA
gaaagggcggacggtgttttagagctaccaaagctcattcgcgactgagcttttttttcagccaactccaattttttttgctcagtcgcgaatgagctttgg

SEQ ID NO: 1831 - DNA, 102 bp, synthetic construct
  source 1..102: mol_type = other DNA
gattggacccgatttgttttagagctaccaaagctcattcgcgactgagcttttttttcagccaactccaattttttttgctcagtcgcgaatgagctttgg

SEQ ID NO: 1832 - DNA, 101 bp, synthetic construct
  source 1..101: mol_type = other DNA
gtggctctaaggtggttttagagctaccaaagctcattcgcgactgagcttttttttcagccaactccaattttttttgctcagtcgcgaatgagctttgg

SEQ ID NO: 1833 - DNA, 102 bp, synthetic construct
  source 1..102: mol_type = other DNA
gcaaacttacacactgttttagagctaccatggcacgatcgacacggaggttttttttcagccaactccaattttttttcctccgtgtcgatcgtgccatgg

SEQ ID NO: 1834 - DNA, 102 bp, synthetic construct
  source 1..102: mol_type = other DNA
gaaagggcggacggtgttttagagctaccatggcacgatcgacacggaggttttttttcagccaactccaattttttttcctccgtgtcgatcgtgccatgg

SEQ ID NO: 1835 - DNA, 102 bp, synthetic construct
  source 1..102: mol_type = other DNA
gattggacccgatttgttttagagctaccatggcacgatcgacacggaggttttttttcagccaactccaattttttttcctccgtgtcgatcgtgccatgg

SEQ ID NO: 1836 - DNA, 101 bp, synthetic construct
  source 1..101: mol_type = other DNA
gtggctctaaggtggttttagagctaccatggcacgatcgacacggaggttttttttcagccaactccaattttttttcctccgtgtcgatcgtgccatgg

SEQ ID NO: 1837 - DNA, 102 bp, synthetic construct
  source 1..102: mol_type = other DNA
gcaaacttacacactgttttagagctacccgaactctctatcgaacgagtttttttttcagccaactccaattttttttactcgttcgatagagagttcggg

SEQ ID NO: 1838 - DNA, 102 bp, synthetic construct
  source 1..102: mol_type = other DNA
gaaagggcggacggtgttttagagctacccgaactctctatcgaacgagtttttttttcagccaactccaattttttttactcgttcgatagagagttcggg

SEQ ID NO: 1839 - DNA, 102 bp, synthetic construct
  source 1..102: mol_type = other DNA
gattggacccgatttgttttagagctacccgaactctctatcgaacgagtttttttttcagccaactccaattttttttactcgttcgatagagagttcggg

SEQ ID NO: 1840 - DNA, 101 bp, synthetic construct
  source 1..101: mol_type = other DNA
gtggctctaaggtggttttagagctacccgaactctctatcgaacgagtttttttttcagccaactccaattttttttactcgttcgatagagagttcggg

SEQ ID NO: 1841 - DNA, 103 bp, synthetic construct
  source 1..103: mol_type = other DNA
gtgcgtaaaagggcgttttagagctaccgtcgttgtaccgtctacttgacttttttttcagccaactccaattttttttgtcaagtagacggtacaacgacgg

SEQ ID NO: 1842 - DNA, 103 bp, synthetic construct
  source 1..103: mol_type = other DNA
ggcatgtgtatggtgttttagagctaccgtcgttgtaccgtctacttgacttttttttcagccaactccaattttttttgtcaagtagacggtacaacgacgg

SEQ ID NO: 1843 - DNA, 103 bp, synthetic construct
  source 1..103: mol_type = other DNA
gacaagatctaaaggttttagagctaccgtcgttgtaccgtctacttgacttttttttcagccaactccaattttttttgtcaagtagacggtacaacgacgg

SEQ ID NO: 1844 - DNA, 104 bp, synthetic construct
  source 1..104: mol_type = other DNA
gttgtataaatcgtggttttagagctaccgtcgttgtaccgtctacttgacttttttttcagccaactccaattttttttgtcaagtagacggtacaacgacgg

SEQ ID NO: 1845 - DNA, 101 bp, synthetic construct
  source 1..101: mol_type = other DNA
gtgcgtaaaagggcgttttagagctacctacactcgacatcggtagctattttttttcagccaactccaatttttttttagctaccgatgtcgagtgtagg

SEQ ID NO: 1846 - DNA, 101 bp, synthetic construct
  source 1..101: mol_type = other DNA
ggcatgtgtatggtgttttagagctacctacactcgacatcggtagctattttttttcagccaactccaatttttttttagctaccgatgtcgagtgtagg

SEQ ID NO: 1847 - DNA, 101 bp, synthetic construct
  source 1..101: mol_type = other DNA
gacaagatctaaaggttttagagctacctacactcgacatcggtagctattttttttcagccaactccaatttttttttagctaccgatgtcgagtgtagg

SEQ ID NO: 1848 - DNA, 102 bp, synthetic construct
  source 1..102: mol_type = other DNA
gttgtataaatcgtggttttagagctacctacactcgacatcggtagctattttttttcagccaactccaatttttttttagctaccgatgtcgagtgtagg

SEQ ID NO: 1849 - DNA, 101 bp, synthetic construct
  source 1..101: mol_type = other DNA
gtgcgtaaaagggcgttttagagctaccctggcggaacgttcgagtaatttttttttcagccaactccaattttttttattactcgaacgttccgccaggg

SEQ ID NO: 1850 - DNA, 101 bp, synthetic construct
  source 1..101: mol_type = other DNA
ggcatgtgtatggtgttttagagctaccctggcggaacgttcgagtaatttttttttcagccaactccaattttttttattactcgaacgttccgccaggg

SEQ ID NO: 1851 - DNA, 101 bp, synthetic construct
  source 1..101: mol_type = other DNA
gacaagatctaaaggttttagagctaccctggcggaacgttcgagtaatttttttttcagccaactccaattttttttattactcgaacgttccgccaggg

SEQ ID NO: 1852 - DNA, 102 bp, synthetic construct
  source 1..102: mol_type = other DNA
gttgtataaatcgtggttttagagctaccctggcggaacgttcgagtaatttttttttcagccaactccaattttttttattactcgaacgttccgccaggg

SEQ ID NO: 1853 - DNA, 101 bp, synthetic construct
  source 1..101: mol_type = other DNA
gtgcgtaaaagggcgttttagagctacctacacgatagtggtcgtgcgcttttttttcagccaactccaattttttttgcgcacgaccactatcgtgtagg

SEQ ID NO: 1854 - DNA, 101 bp, synthetic construct
  source 1..101: mol_type = other DNA
ggcatgtgtatggtgttttagagctacctacacgatagtggtcgtgcgcttttttttcagccaactccaattttttttgcgcacgaccactatcgtgtagg

SEQ ID NO: 1855 - DNA, 101 bp, synthetic construct
  source 1..101: mol_type = other DNA
gacaagatctaaaggttttagagctacctacacgatagtggtcgtgcgcttttttttcagccaactccaattttttttgcgcacgaccactatcgtgtagg

SEQ ID NO: 1856 - DNA, 102 bp, synthetic construct
  source 1..102: mol_type = other DNA
gttgtataaatcgtggttttagagctacctacacgatagtggtcgtgcgcttttttttcagccaactccaattttttttgcgcacgaccactatcgtgtagg

SEQ ID NO: 1857 - DNA, 103 bp, synthetic construct
  source 1..103: mol_type = other DNA
gtgcgtaaaagggcgttttagagctaccttcccgacttccgtaggagcgcttttttttcagccaactccaattttttttgcgctcctacggaagtcgggaagg

SEQ ID NO: 1858 - DNA, 103 bp, synthetic construct
  source 1..103: mol_type = other DNA
ggcatgtgtatggtgttttagagctaccttcccgacttccgtaggagcgcttttttttcagccaactccaattttttttgcgctcctacggaagtcgggaagg

SEQ ID NO: 1859 - DNA, 103 bp, synthetic construct
  source 1..103: mol_type = other DNA
gacaagatctaaaggttttagagctaccttcccgacttccgtaggagcgcttttttttcagccaactccaattttttttgcgctcctacggaagtcgggaagg

SEQ ID NO: 1860 - DNA, 104 bp, synthetic construct
  source 1..104: mol_type = other DNA
gttgtataaatcgtggttttagagctaccttcccgacttccgtaggagcgcttttttttcagccaactccaattttttttgcgctcctacggaagtcgggaagg

SEQ ID NO: 1861 - DNA, 103 bp, synthetic construct
  source 1..103: mol_type = other DNA
gtgcgtaaaagggcgttttagagctacctgaaggtaaagatcgggtcctcttttttttcagccaactccaattttttttgaggacccgatctttaccttcagg

SEQ ID NO: 1862 - DNA, 103 bp, synthetic construct
  source 1..103: mol_type = other DNA
ggcatgtgtatggtgttttagagctacctgaaggtaaagatcgggtcctcttttttttcagccaactccaattttttttgaggacccgatctttaccttcagg

SEQ ID NO: 1863 - DNA, 103 bp, synthetic construct
  source 1..103: mol_type = other DNA
gacaagatctaaaggttttagagctacctgaaggtaaagatcgggtcctcttttttttcagccaactccaattttttttgaggacccgatctttaccttcagg

SEQ ID NO: 1864 - DNA, 104 bp, synthetic construct
  source 1..104: mol_type = other DNA
gttgtataaatcgtggttttagagctacctgaaggtaaagatcgggtcctcttttttttcagccaactccaattttttttgaggacccgatctttaccttcagg

SEQ ID NO: 1865 - DNA, 101 bp, synthetic construct
  source 1..101: mol_type = other DNA
gtgcgtaaaagggcgttttagagctacctggttatagcggacgcactgtttttttttcagccaactccaattttttttacagtgcgtccgctataaccagg

SEQ ID NO: 1866 - DNA, 101 bp, synthetic construct
  source 1..101: mol_type = other DNA
ggcatgtgtatggtgttttagagctacctggttatagcggacgcactgtttttttttcagccaactccaattttttttacagtgcgtccgctataaccagg

SEQ ID NO: 1867 - DNA, 101 bp, synthetic construct
  source 1..101: mol_type = other DNA
gacaagatctaaaggttttagagctacctggttatagcggacgcactgtttttttttcagccaactccaattttttttacagtgcgtccgctataaccagg

SEQ ID NO: 1868 - DNA, 102 bp, synthetic construct
  source 1..102: mol_type = other DNA
gttgtataaatcgtggttttagagctacctggttatagcggacgcactgtttttttttcagccaactccaattttttttacagtgcgtccgctataaccagg

SEQ ID NO: 1869 - DNA, 101 bp, synthetic construct
  source 1..101: mol_type = other DNA
gtgcgtaaaagggcgttttagagctaccgcatcgtattatctgcgaagcttttttttcagccaactccaattttttttgcttcgcagataatacgatgcgg

SEQ ID NO: 1870 - DNA, 101 bp, synthetic construct
  source 1..101: mol_type = other DNA
ggcatgtgtatggtgttttagagctaccgcatcgtattatctgcgaagcttttttttcagccaactccaattttttttgcttcgcagataatacgatgcgg

SEQ ID NO: 1871 - DNA, 101 bp, synthetic construct
  source 1..101: mol_type = other DNA
gacaagatctaaaggttttagagctaccgcatcgtattatctgcgaagcttttttttcagccaactccaattttttttgcttcgcagataatacgatgcgg

SEQ ID NO: 1872 - DNA, 102 bp, synthetic construct
  source 1..102: mol_type = other DNA
gttgtataaatcgtggttttagagctaccgcatcgtattatctgcgaagcttttttttcagccaactccaattttttttgcttcgcagataatacgatgcgg

SEQ ID NO: 1873 - DNA, 101 bp, synthetic construct
  source 1..101: mol_type = other DNA
gtgcgtaaaagggcgttttagagctaccgctaggacgttcaacggagtcttttttttcagccaactccaattttttttgactccgttgaacgtcctagcgg

SEQ ID NO: 1874 - DNA, 101 bp, synthetic construct
  source 1..101: mol_type = other DNA
ggcatgtgtatggtgttttagagctaccgctaggacgttcaacggagtcttttttttcagccaactccaattttttttgactccgttgaacgtcctagcgg

SEQ ID NO: 1875 - DNA, 101 bp, synthetic construct
  source 1..101: mol_type = other DNA
gacaagatctaaaggttttagagctaccgctaggacgttcaacggagtcttttttttcagccaactccaattttttttgactccgttgaacgtcctagcgg

SEQ ID NO: 1876 - DNA, 102 bp, synthetic construct
  source 1..102: mol_type = other DNA
gttgtataaatcgtggttttagagctaccgctaggacgttcaacggagtcttttttttcagccaactccaattttttttgactccgttgaacgtcctagcgg

SEQ ID NO: 1877 - DNA, 101 bp, synthetic construct
  source 1..101: mol_type = other DNA
gtgcgtaaaagggcgttttagagctaccatagcggtactatcggcatctttttttttcagccaactccaattttttttagatgccgatagtaccgctatgg

SEQ ID NO: 1878 - DNA, 101 bp, synthetic construct
  source 1..101: mol_type = other DNA
ggcatgtgtatggtgttttagagctaccatagcggtactatcggcatctttttttttcagccaactccaattttttttagatgccgatagtaccgctatgg

SEQ ID NO: 1879 - DNA, 101 bp, synthetic construct
  source 1..101: mol_type = other DNA
gacaagatctaaaggttttagagctaccatagcggtactatcggcatctttttttttcagccaactccaattttttttagatgccgatagtaccgctatgg

SEQ ID NO: 1880 - DNA, 102 bp, synthetic construct
  source 1..102: mol_type = other DNA
gttgtataaatcgtggttttagagctaccatagcggtactatcggcatctttttttttcagccaactccaattttttttagatgccgatagtaccgctatgg

SEQ ID NO: 1881 - DNA, 101 bp, synthetic construct
  source 1..101: mol_type = other DNA
gtgcgtaaaagggcgttttagagctacctcgtactagtctcgcatgaccttttttttcagccaactccaattttttttggtcatgcgagactagtacgagg

SEQ ID NO: 1882 - DNA, 101 bp, synthetic construct
  source 1..101: mol_type = other DNA
ggcatgtgtatggtgttttagagctacctcgtactagtctcgcatgaccttttttttcagccaactccaattttttttggtcatgcgagactagtacgagg

SEQ ID NO: 1883 - DNA, 101 bp, synthetic construct
  source 1..101: mol_type = other DNA
gacaagatctaaaggttttagagctacctcgtactagtctcgcatgaccttttttttcagccaactccaattttttttggtcatgcgagactagtacgagg

SEQ ID NO: 1884 - DNA, 102 bp, synthetic construct
  source 1..102: mol_type = other DNA
gttgtataaatcgtggttttagagctacctcgtactagtctcgcatgaccttttttttcagccaactccaattttttttggtcatgcgagactagtacgagg

SEQ ID NO: 1885 - DNA, 101 bp, synthetic construct
  source 1..101: mol_type = other DNA
gtgcgtaaaagggcgttttagagctaccgatagtgctaaacgacgctttttttttttcagccaactccaattttttttaaagcgtcgtttagcactatcgg

SEQ ID NO: 1886 - DNA, 101 bp, synthetic construct
  source 1..101: mol_type = other DNA
ggcatgtgtatggtgttttagagctaccgatagtgctaaacgacgctttttttttttcagccaactccaattttttttaaagcgtcgtttagcactatcgg

SEQ ID NO: 1887 - DNA, 101 bp, synthetic construct
  source 1..101: mol_type = other DNA
gacaagatctaaaggttttagagctaccgatagtgctaaacgacgctttttttttttcagccaactccaattttttttaaagcgtcgtttagcactatcgg

SEQ ID NO: 1888 - DNA, 102 bp, synthetic construct
  source 1..102: mol_type = other DNA
gttgtataaatcgtggttttagagctaccgatagtgctaaacgacgctttttttttttcagccaactccaattttttttaaagcgtcgtttagcactatcgg

SEQ ID NO: 1889 - DNA, 101 bp, synthetic construct
  source 1..101: mol_type = other DNA
gtgcgtaaaagggcgttttagagctacccgttatcgacgttcaaggaacttttttttcagccaactccaattttttttgttccttgaacgtcgataacggg

SEQ ID NO: 1890 - DNA, 101 bp, synthetic construct
  source 1..101: mol_type = other DNA
ggcatgtgtatggtgttttagagctacccgttatcgacgttcaaggaacttttttttcagccaactccaattttttttgttccttgaacgtcgataacggg

SEQ ID NO: 1891 - DNA, 101 bp, synthetic construct
  source 1..101: mol_type = other DNA
gacaagatctaaaggttttagagctacccgttatcgacgttcaaggaacttttttttcagccaactccaattttttttgttccttgaacgtcgataacggg

SEQ ID NO: 1892 - DNA, 102 bp, synthetic construct
  source 1..102: mol_type = other DNA
gttgtataaatcgtggttttagagctacccgttatcgacgttcaaggaacttttttttcagccaactccaattttttttgttccttgaacgtcgataacggg

SEQ ID NO: 1893 - DNA, 101 bp, synthetic construct
  source 1..101: mol_type = other DNA
gtgcgtaaaagggcgttttagagctaccgatcaatgcggtctgcgtaacttttttttcagccaactccaattttttttgttacgcagaccgcattgatcgg

SEQ ID NO: 1894 - DNA, 101 bp, synthetic construct
  source 1..101: mol_type = other DNA
ggcatgtgtatggtgttttagagctaccgatcaatgcggtctgcgtaacttttttttcagccaactccaattttttttgttacgcagaccgcattgatcgg

SEQ ID NO: 1895 - DNA, 101 bp, synthetic construct
  source 1..101: mol_type = other DNA
gacaagatctaaaggttttagagctaccgatcaatgcggtctgcgtaacttttttttcagccaactccaattttttttgttacgcagaccgcattgatcgg

SEQ ID NO: 1896 - DNA, 102 bp, synthetic construct
  source 1..102: mol_type = other DNA
gttgtataaatcgtggttttagagctaccgatcaatgcggtctgcgtaacttttttttcagccaactccaattttttttgttacgcagaccgcattgatcgg

SEQ ID NO: 1897 - DNA, 101 bp, synthetic construct
  source 1..101: mol_type = other DNA
gtgcgtaaaagggcgttttagagctacccttactcgcgatactctcgacttttttttcagccaactccaattttttttgtcgagagtatcgcgagtaaggg

SEQ ID NO: 1898 - DNA, 101 bp, synthetic construct
  source 1..101: mol_type = other DNA
ggcatgtgtatggtgttttagagctacccttactcgcgatactctcgacttttttttcagccaactccaattttttttgtcgagagtatcgcgagtaaggg

SEQ ID NO: 1899 - DNA, 101 bp, synthetic construct
  source 1..101: mol_type = other DNA
gacaagatctaaaggttttagagctacccttactcgcgatactctcgacttttttttcagccaactccaattttttttgtcgagagtatcgcgagtaaggg

SEQ ID NO: 1900 - DNA, 102 bp, synthetic construct
  source 1..102: mol_type = other DNA
gttgtataaatcgtggttttagagctacccttactcgcgatactctcgacttttttttcagccaactccaattttttttgtcgagagtatcgcgagtaaggg

SEQ ID NO: 1901 - DNA, 101 bp, synthetic construct
  source 1..101: mol_type = other DNA
gtgcgtaaaagggcgttttagagctaccgcggacggtaagcacggaatattttttttcagccaactccaatttttttttattccgtgcttaccgtccgcgg

SEQ ID NO: 1902 - DNA, 101 bp, synthetic construct
  source 1..101: mol_type = other DNA
ggcatgtgtatggtgttttagagctaccgcggacggtaagcacggaatattttttttcagccaactccaatttttttttattccgtgcttaccgtccgcgg

SEQ ID NO: 1903 - DNA, 101 bp, synthetic construct
  source 1..101: mol_type = other DNA
gacaagatctaaaggttttagagctaccgcggacggtaagcacggaatattttttttcagccaactccaatttttttttattccgtgcttaccgtccgcgg

SEQ ID NO: 1904 - DNA, 102 bp, synthetic construct
  source 1..102: mol_type = other DNA
gttgtataaatcgtggttttagagctaccgcggacggtaagcacggaatattttttttcagccaactccaatttttttttattccgtgcttaccgtccgcgg

SEQ ID NO: 1905 - DNA, 101 bp, synthetic construct
  source 1..101: mol_type = other DNA
gtgcgtaaaagggcgttttagagctacctatagtcacgaatcgtagggtttttttttcagccaactccaattttttttaccctacgattcgtgactatagg

SEQ ID NO: 1906 - DNA, 101 bp, synthetic construct
  source 1..101: mol_type = other DNA
ggcatgtgtatggtgttttagagctacctatagtcacgaatcgtagggtttttttttcagccaactccaattttttttaccctacgattcgtgactatagg

SEQ ID NO: 1907 - DNA, 101 bp, synthetic construct
  source 1..101: mol_type = other DNA
gacaagatctaaaggttttagagctacctatagtcacgaatcgtagggtttttttttcagccaactccaattttttttaccctacgattcgtgactatagg

SEQ ID NO: 1908 - DNA, 102 bp, synthetic construct
  source 1..102: mol_type = other DNA
gttgtataaatcgtggttttagagctacctatagtcacgaatcgtagggtttttttttcagccaactccaattttttttaccctacgattcgtgactatagg

SEQ ID NO: 1909 - DNA, 101 bp, synthetic construct
  source 1..101: mol_type = other DNA
gtgcgtaaaagggcgttttagagctacccgtcgtcacgtatgcgtagcattttttttcagccaactccaatttttttttgctacgcatacgtgacgacggg

SEQ ID NO: 1910 - DNA, 101 bp, synthetic construct
  source 1..101: mol_type = other DNA
ggcatgtgtatggtgttttagagctacccgtcgtcacgtatgcgtagcattttttttcagccaactccaatttttttttgctacgcatacgtgacgacggg

SEQ ID NO: 1911 - DNA, 101 bp, synthetic construct
  source 1..101: mol_type = other DNA
gacaagatctaaaggttttagagctacccgtcgtcacgtatgcgtagcattttttttcagccaactccaatttttttttgctacgcatacgtgacgacggg

SEQ ID NO: 1912 - DNA, 102 bp, synthetic construct
  source 1..102: mol_type = other DNA
gttgtataaatcgtggttttagagctacccgtcgtcacgtatgcgtagcattttttttcagccaactccaatttttttttgctacgcatacgtgacgacggg

SEQ ID NO: 1913 - DNA, 101 bp, synthetic construct
  source 1..101: mol_type = other DNA
gtgcgtaaaagggcgttttagagctacccgagaggtagtagacgacgcattttttttcagccaactccaatttttttttgcgtcgtctactacctctcggg

SEQ ID NO: 1914 - DNA, 101 bp, synthetic construct
  source 1..101: mol_type = other DNA
ggcatgtgtatggtgttttagagctacccgagaggtagtagacgacgcattttttttcagccaactccaatttttttttgcgtcgtctactacctctcggg

SEQ ID NO: 1915 - DNA, 101 bp, synthetic construct
  source 1..101: mol_type = other DNA
gacaagatctaaaggttttagagctacccgagaggtagtagacgacgcattttttttcagccaactccaatttttttttgcgtcgtctactacctctcggg

SEQ ID NO: 1916 - DNA, 102 bp, synthetic construct
  source 1..102: mol_type = other DNA
gttgtataaatcgtggttttagagctacccgagaggtagtagacgacgcattttttttcagccaactccaatttttttttgcgtcgtctactacctctcggg

SEQ ID NO: 1917 - DNA, 101 bp, synthetic construct
  source 1..101: mol_type = other DNA
gtgcgtaaaagggcgttttagagctaccgacgtctacggacgggagctattttttttcagccaactccaatttttttttagctcccgtccgtagacgtcgg

SEQ ID NO: 1918 - DNA, 101 bp, synthetic construct
  source 1..101: mol_type = other DNA
ggcatgtgtatggtgttttagagctaccgacgtctacggacgggagctattttttttcagccaactccaatttttttttagctcccgtccgtagacgtcgg

SEQ ID NO: 1919 - DNA, 101 bp, synthetic construct
  source 1..101: mol_type = other DNA
gacaagatctaaaggttttagagctaccgacgtctacggacgggagctattttttttcagccaactccaatttttttttagctcccgtccgtagacgtcgg

SEQ ID NO: 1920 - DNA, 102 bp, synthetic construct
  source 1..102: mol_type = other DNA
gttgtataaatcgtggttttagagctaccgacgtctacggacgggagctattttttttcagccaactccaatttttttttagctcccgtccgtagacgtcgg

SEQ ID NO: 1921 - DNA, 101 bp, synthetic construct
  source 1..101: mol_type = other DNA
gtgcgtaaaagggcgttttagagctaccaaagctcattcgcgactgagcttttttttcagccaactccaattttttttgctcagtcgcgaatgagctttgg

SEQ ID NO: 1922 - DNA, 101 bp, synthetic construct
  source 1..101: mol_type = other DNA
ggcatgtgtatggtgttttagagctaccaaagctcattcgcgactgagcttttttttcagccaactccaattttttttgctcagtcgcgaatgagctttgg

SEQ ID NO: 1923 - DNA, 101 bp, synthetic construct
  source 1..101: mol_type = other DNA
gacaagatctaaaggttttagagctaccaaagctcattcgcgactgagcttttttttcagccaactccaattttttttgctcagtcgcgaatgagctttgg

SEQ ID NO: 1924 - DNA, 102 bp, synthetic construct
  source 1..102: mol_type = other DNA
gttgtataaatcgtggttttagagctaccaaagctcattcgcgactgagcttttttttcagccaactccaattttttttgctcagtcgcgaatgagctttgg

SEQ ID NO: 1925 - DNA, 101 bp, synthetic construct
  source 1..101: mol_type = other DNA
gtgcgtaaaagggcgttttagagctaccatggcacgatcgacacggaggttttttttcagccaactccaattttttttcctccgtgtcgatcgtgccatgg

SEQ ID NO: 1926 - DNA, 101 bp, synthetic construct
  source 1..101: mol_type = other DNA
ggcatgtgtatggtgttttagagctaccatggcacgatcgacacggaggttttttttcagccaactccaattttttttcctccgtgtcgatcgtgccatgg

SEQ ID NO: 1927 - DNA, 101 bp, synthetic construct
  source 1..101: mol_type = other DNA
gacaagatctaaaggttttagagctaccatggcacgatcgacacggaggttttttttcagccaactccaattttttttcctccgtgtcgatcgtgccatgg

SEQ ID NO: 1928 - DNA, 102 bp, synthetic construct
  source 1..102: mol_type = other DNA
gttgtataaatcgtggttttagagctaccatggcacgatcgacacggaggttttttttcagccaactccaattttttttcctccgtgtcgatcgtgccatgg

SEQ ID NO: 1929 - DNA, 101 bp, synthetic construct
  source 1..101: mol_type = other DNA
gtgcgtaaaagggcgttttagagctacccgaactctctatcgaacgagtttttttttcagccaactccaattttttttactcgttcgatagagagttcggg

SEQ ID NO: 1930 - DNA, 101 bp, synthetic construct
  source 1..101: mol_type = other DNA
ggcatgtgtatggtgttttagagctacccgaactctctatcgaacgagtttttttttcagccaactccaattttttttactcgttcgatagagagttcggg

SEQ ID NO: 1931 - DNA, 101 bp, synthetic construct
  source 1..101: mol_type = other DNA
gacaagatctaaaggttttagagctacccgaactctctatcgaacgagtttttttttcagccaactccaattttttttactcgttcgatagagagttcggg

SEQ ID NO: 1932 - DNA, 102 bp, synthetic construct
  source 1..102: mol_type = other DNA
gttgtataaatcgtggttttagagctacccgaactctctatcgaacgagtttttttttcagccaactccaattttttttactcgttcgatagagagttcggg

SEQ ID NO: 1933 - DNA, 103 bp, synthetic construct
  source 1..103: mol_type = other DNA
gctttcacggaagggttttagagctaccgtcgttgtaccgtctacttgacttttttttcagccaactccaattttttttgtcaagtagacggtacaacgacgg

SEQ ID NO: 1934 - DNA, 104 bp, synthetic construct
  source 1..104: mol_type = other DNA
gctgcgcatcgggtggttttagagctaccgtcgttgtaccgtctacttgacttttttttcagccaactccaattttttttgtcaagtagacggtacaacgacgg

SEQ ID NO: 1935 - DNA, 104 bp, synthetic construct
  source 1..104: mol_type = other DNA
gccgcacttccgcgagttttagagctaccgtcgttgtaccgtctacttgacttttttttcagccaactccaattttttttgtcaagtagacggtacaacgacgg

SEQ ID NO: 1936 - DNA, 103 bp, synthetic construct
  source 1..103: mol_type = other DNA
gcgccaagcggtgtgttttagagctaccgtcgttgtaccgtctacttgacttttttttcagccaactccaattttttttgtcaagtagacggtacaacgacgg

SEQ ID NO: 1937 - DNA, 101 bp, synthetic construct
  source 1..101: mol_type = other DNA
gctttcacggaagggttttagagctacctacactcgacatcggtagctattttttttcagccaactccaatttttttttagctaccgatgtcgagtgtagg

SEQ ID NO: 1938 - DNA, 102 bp, synthetic construct
  source 1..102: mol_type = other DNA
gctgcgcatcgggtggttttagagctacctacactcgacatcggtagctattttttttcagccaactccaatttttttttagctaccgatgtcgagtgtagg

SEQ ID NO: 1939 - DNA, 102 bp, synthetic construct
  source 1..102: mol_type = other DNA
gccgcacttccgcgagttttagagctacctacactcgacatcggtagctattttttttcagccaactccaatttttttttagctaccgatgtcgagtgtagg

SEQ ID NO: 1940 - DNA, 101 bp, synthetic construct
  source 1..101: mol_type = other DNA
gcgccaagcggtgtgttttagagctacctacactcgacatcggtagctattttttttcagccaactccaatttttttttagctaccgatgtcgagtgtagg

SEQ ID NO: 1941 - DNA, 101 bp, synthetic construct
  source 1..101: mol_type = other DNA
gctttcacggaagggttttagagctaccctggcggaacgttcgagtaatttttttttcagccaactccaattttttttattactcgaacgttccgccaggg

SEQ ID NO: 1942 - DNA, 102 bp, synthetic construct
  source 1..102: mol_type = other DNA
gctgcgcatcgggtggttttagagctaccctggcggaacgttcgagtaatttttttttcagccaactccaattttttttattactcgaacgttccgccaggg

SEQ ID NO: 1943 - DNA, 102 bp, synthetic construct
  source 1..102: mol_type = other DNA
gccgcacttccgcgagttttagagctaccctggcggaacgttcgagtaatttttttttcagccaactccaattttttttattactcgaacgttccgccaggg

SEQ ID NO: 1944 - DNA, 101 bp, synthetic construct
  source 1..101: mol_type = other DNA
gcgccaagcggtgtgttttagagctaccctggcggaacgttcgagtaatttttttttcagccaactccaattttttttattactcgaacgttccgccaggg

SEQ ID NO: 1945 - DNA, 101 bp, synthetic construct
  source 1..101: mol_type = other DNA
gctttcacggaagggttttagagctacctacacgatagtggtcgtgcgcttttttttcagccaactccaattttttttgcgcacgaccactatcgtgtagg

SEQ ID NO: 1946 - DNA, 102 bp, synthetic construct
  source 1..102: mol_type = other DNA
gctgcgcatcgggtggttttagagctacctacacgatagtggtcgtgcgcttttttttcagccaactccaattttttttgcgcacgaccactatcgtgtagg

SEQ ID NO: 1947 - DNA, 102 bp, synthetic construct
  source 1..102: mol_type = other DNA
gccgcacttccgcgagttttagagctacctacacgatagtggtcgtgcgcttttttttcagccaactccaattttttttgcgcacgaccactatcgtgtagg

SEQ ID NO: 1948 - DNA, 101 bp, synthetic construct
  source 1..101: mol_type = other DNA
gcgccaagcggtgtgttttagagctacctacacgatagtggtcgtgcgcttttttttcagccaactccaattttttttgcgcacgaccactatcgtgtagg

SEQ ID NO: 1949 - DNA, 103 bp, synthetic construct
  source 1..103: mol_type = other DNA
gctttcacggaagggttttagagctaccttcccgacttccgtaggagcgcttttttttcagccaactccaattttttttgcgctcctacggaagtcgggaagg

SEQ ID NO: 1950 - DNA, 104 bp, synthetic construct
  source 1..104: mol_type = other DNA
gctgcgcatcgggtggttttagagctaccttcccgacttccgtaggagcgcttttttttcagccaactccaattttttttgcgctcctacggaagtcgggaagg

SEQ ID NO: 1951 - DNA, 104 bp, synthetic construct
  source 1..104: mol_type = other DNA
gccgcacttccgcgagttttagagctaccttcccgacttccgtaggagcgcttttttttcagccaactccaattttttttgcgctcctacggaagtcgggaagg

SEQ ID NO: 1952 - DNA, 103 bp, synthetic construct
  source 1..103: mol_type = other DNA
gcgccaagcggtgtgttttagagctaccttcccgacttccgtaggagcgcttttttttcagccaactccaattttttttgcgctcctacggaagtcgggaagg

SEQ ID NO: 1953 - DNA, 103 bp, synthetic construct
  source 1..103: mol_type = other DNA
gctttcacggaagggttttagagctacctgaaggtaaagatcgggtcctcttttttttcagccaactccaattttttttgaggacccgatctttaccttcagg

SEQ ID NO: 1954 - DNA, 104 bp, synthetic construct
  source 1..104: mol_type = other DNA
gctgcgcatcgggtggttttagagctacctgaaggtaaagatcgggtcctcttttttttcagccaactccaattttttttgaggacccgatctttaccttcagg

SEQ ID NO: 1955 - DNA, 104 bp, synthetic construct
  source 1..104: mol_type = other DNA
gccgcacttccgcgagttttagagctacctgaaggtaaagatcgggtcctcttttttttcagccaactccaattttttttgaggacccgatctttaccttcagg

SEQ ID NO: 1956 - DNA, 103 bp, synthetic construct
  source 1..103: mol_type = other DNA
gcgccaagcggtgtgttttagagctacctgaaggtaaagatcgggtcctcttttttttcagccaactccaattttttttgaggacccgatctttaccttcagg

SEQ ID NO: 1957 - DNA, 101 bp, synthetic construct
  source 1..101: mol_type = other DNA
gctttcacggaagggttttagagctacctggttatagcggacgcactgtttttttttcagccaactccaattttttttacagtgcgtccgctataaccagg

SEQ ID NO: 1958 - DNA, 102 bp, synthetic construct
  source 1..102: mol_type = other DNA
gctgcgcatcgggtggttttagagctacctggttatagcggacgcactgtttttttttcagccaactccaattttttttacagtgcgtccgctataaccagg

SEQ ID NO: 1959 - DNA, 102 bp, synthetic construct
  source 1..102: mol_type = other DNA
gccgcacttccgcgagttttagagctacctggttatagcggacgcactgtttttttttcagccaactccaattttttttacagtgcgtccgctataaccagg

SEQ ID NO: 1960 - DNA, 101 bp, synthetic construct
  source 1..101: mol_type = other DNA
gcgccaagcggtgtgttttagagctacctggttatagcggacgcactgtttttttttcagccaactccaattttttttacagtgcgtccgctataaccagg

SEQ ID NO: 1961 - DNA, 101 bp, synthetic construct
  source 1..101: mol_type = other DNA
gctttcacggaagggttttagagctaccgcatcgtattatctgcgaagcttttttttcagccaactccaattttttttgcttcgcagataatacgatgcgg

SEQ ID NO: 1962 - DNA, 102 bp, synthetic construct
  source 1..102: mol_type = other DNA
gctgcgcatcgggtggttttagagctaccgcatcgtattatctgcgaagcttttttttcagccaactccaattttttttgcttcgcagataatacgatgcgg

SEQ ID NO: 1963 - DNA, 102 bp, synthetic construct
  source 1..102: mol_type = other DNA
gccgcacttccgcgagttttagagctaccgcatcgtattatctgcgaagcttttttttcagccaactccaattttttttgcttcgcagataatacgatgcgg

SEQ ID NO: 1964 - DNA, 101 bp, synthetic construct
  source 1..101: mol_type = other DNA
gcgccaagcggtgtgttttagagctaccgcatcgtattatctgcgaagcttttttttcagccaactccaattttttttgcttcgcagataatacgatgcgg

SEQ ID NO: 1965 - DNA, 101 bp, synthetic construct
  source 1..101: mol_type = other DNA
gctttcacggaagggttttagagctaccgctaggacgttcaacggagtcttttttttcagccaactccaattttttttgactccgttgaacgtcctagcgg

SEQ ID NO: 1966 - DNA, 102 bp, synthetic construct
  source 1..102: mol_type = other DNA
gctgcgcatcgggtggttttagagctaccgctaggacgttcaacggagtcttttttttcagccaactccaattttttttgactccgttgaacgtcctagcgg

SEQ ID NO: 1967 - DNA, 102 bp, synthetic construct
  source 1..102: mol_type = other DNA
gccgcacttccgcgagttttagagctaccgctaggacgttcaacggagtcttttttttcagccaactccaattttttttgactccgttgaacgtcctagcgg

SEQ ID NO: 1968 - DNA, 101 bp, synthetic construct
  source 1..101: mol_type = other DNA
gcgccaagcggtgtgttttagagctaccgctaggacgttcaacggagtcttttttttcagccaactccaattttttttgactccgttgaacgtcctagcgg

SEQ ID NO: 1969 - DNA, 101 bp, synthetic construct
  source 1..101: mol_type = other DNA
gctttcacggaagggttttagagctaccatagcggtactatcggcatctttttttttcagccaactccaattttttttagatgccgatagtaccgctatgg

SEQ ID NO: 1970 - DNA, 102 bp, synthetic construct
  source 1..102: mol_type = other DNA
gctgcgcatcgggtggttttagagctaccatagcggtactatcggcatctttttttttcagccaactccaattttttttagatgccgatagtaccgctatgg

SEQ ID NO: 1971 - DNA, 102 bp, synthetic construct
  source 1..102: mol_type = other DNA
gccgcacttccgcgagttttagagctaccatagcggtactatcggcatctttttttttcagccaactccaattttttttagatgccgatagtaccgctatgg

SEQ ID NO: 1972 - DNA, 101 bp, synthetic construct
  source 1..101: mol_type = other DNA
gcgccaagcggtgtgttttagagctaccatagcggtactatcggcatctttttttttcagccaactccaattttttttagatgccgatagtaccgctatgg

SEQ ID NO: 1973 - DNA, 101 bp, synthetic construct
  source 1..101: mol_type = other DNA
gctttcacggaagggttttagagctacctcgtactagtctcgcatgaccttttttttcagccaactccaattttttttggtcatgcgagactagtacgagg

SEQ ID NO: 1974 - DNA, 102 bp, synthetic construct
  source 1..102: mol_type = other DNA
gctgcgcatcgggtggttttagagctacctcgtactagtctcgcatgaccttttttttcagccaactccaattttttttggtcatgcgagactagtacgagg

SEQ ID NO: 1975 - DNA, 102 bp, synthetic construct
  source 1..102: mol_type = other DNA
gccgcacttccgcgagttttagagctacctcgtactagtctcgcatgaccttttttttcagccaactccaattttttttggtcatgcgagactagtacgagg

SEQ ID NO: 1976 - DNA, 101 bp, synthetic construct
  source 1..101: mol_type = other DNA
gcgccaagcggtgtgttttagagctacctcgtactagtctcgcatgaccttttttttcagccaactccaattttttttggtcatgcgagactagtacgagg

SEQ ID NO: 1977 - DNA, 101 bp, synthetic construct
  source 1..101: mol_type = other DNA
gctttcacggaagggttttagagctaccgatagtgctaaacgacgctttttttttttcagccaactccaattttttttaaagcgtcgtttagcactatcgg

SEQ ID NO: 1978 - DNA, 102 bp, synthetic construct
  source 1..102: mol_type = other DNA
gctgcgcatcgggtggttttagagctaccgatagtgctaaacgacgctttttttttttcagccaactccaattttttttaaagcgtcgtttagcactatcgg

SEQ ID NO: 1979 - DNA, 102 bp, synthetic construct
  source 1..102: mol_type = other DNA
gccgcacttccgcgagttttagagctaccgatagtgctaaacgacgctttttttttttcagccaactccaattttttttaaagcgtcgtttagcactatcgg

SEQ ID NO: 1980 - DNA, 101 bp, synthetic construct
  source 1..101: mol_type = other DNA
gcgccaagcggtgtgttttagagctaccgatagtgctaaacgacgctttttttttttcagccaactccaattttttttaaagcgtcgtttagcactatcgg

SEQ ID NO: 1981 - DNA, 101 bp, synthetic construct
  source 1..101: mol_type = other DNA
gctttcacggaagggttttagagctacccgttatcgacgttcaaggaacttttttttcagccaactccaattttttttgttccttgaacgtcgataacggg

SEQ ID NO: 1982 - DNA, 102 bp, synthetic construct
  source 1..102: mol_type = other DNA
gctgcgcatcgggtggttttagagctacccgttatcgacgttcaaggaacttttttttcagccaactccaattttttttgttccttgaacgtcgataacggg

SEQ ID NO: 1983 - DNA, 102 bp, synthetic construct
  source 1..102: mol_type = other DNA
gccgcacttccgcgagttttagagctacccgttatcgacgttcaaggaacttttttttcagccaactccaattttttttgttccttgaacgtcgataacggg

SEQ ID NO: 1984 - DNA, 101 bp, synthetic construct
  source 1..101: mol_type = other DNA
gcgccaagcggtgtgttttagagctacccgttatcgacgttcaaggaacttttttttcagccaactccaattttttttgttccttgaacgtcgataacggg

SEQ ID NO: 1985 - DNA, 101 bp, synthetic construct
  source 1..101: mol_type = other DNA
gctttcacggaagggttttagagctaccgatcaatgcggtctgcgtaacttttttttcagccaactccaattttttttgttacgcagaccgcattgatcgg

SEQ ID NO: 1986 - DNA, 102 bp, synthetic construct
  source 1..102: mol_type = other DNA
gctgcgcatcgggtggttttagagctaccgatcaatgcggtctgcgtaacttttttttcagccaactccaattttttttgttacgcagaccgcattgatcgg

SEQ ID NO: 1987 - DNA, 102 bp, synthetic construct
  source 1..102: mol_type = other DNA
gccgcacttccgcgagttttagagctaccgatcaatgcggtctgcgtaacttttttttcagccaactccaattttttttgttacgcagaccgcattgatcgg

SEQ ID NO: 1988 - DNA, 101 bp, synthetic construct
  source 1..101: mol_type = other DNA
gcgccaagcggtgtgttttagagctaccgatcaatgcggtctgcgtaacttttttttcagccaactccaattttttttgttacgcagaccgcattgatcgg

SEQ ID NO: 1989 - DNA, 101 bp, synthetic construct
  source 1..101: mol_type = other DNA
gctttcacggaagggttttagagctacccttactcgcgatactctcgacttttttttcagccaactccaattttttttgtcgagagtatcgcgagtaaggg

SEQ ID NO: 1990 - DNA, 102 bp, synthetic construct
  source 1..102: mol_type = other DNA
gctgcgcatcgggtggttttagagctacccttactcgcgatactctcgacttttttttcagccaactccaattttttttgtcgagagtatcgcgagtaaggg

SEQ ID NO: 1991 - DNA, 102 bp, synthetic construct
  source 1..102: mol_type = other DNA
gccgcacttccgcgagttttagagctacccttactcgcgatactctcgacttttttttcagccaactccaattttttttgtcgagagtatcgcgagtaaggg

SEQ ID NO: 1992 - DNA, 101 bp, synthetic construct
  source 1..101: mol_type = other DNA
gcgccaagcggtgtgttttagagctacccttactcgcgatactctcgacttttttttcagccaactccaattttttttgtcgagagtatcgcgagtaaggg

SEQ ID NO: 1993 - DNA, 101 bp, synthetic construct
  source 1..101: mol_type = other DNA
gctttcacggaagggttttagagctaccgcggacggtaagcacggaatattttttttcagccaactccaatttttttttattccgtgcttaccgtccgcgg

SEQ ID NO: 1994 - DNA, 102 bp, synthetic construct
  source 1..102: mol_type = other DNA
gctgcgcatcgggtggttttagagctaccgcggacggtaagcacggaatattttttttcagccaactccaatttttttttattccgtgcttaccgtccgcgg

SEQ ID NO: 1995 - DNA, 102 bp, synthetic construct
  source 1..102: mol_type = other DNA
gccgcacttccgcgagttttagagctaccgcggacggtaagcacggaatattttttttcagccaactccaatttttttttattccgtgcttaccgtccgcgg

SEQ ID NO: 1996 - DNA, 101 bp, synthetic construct
  source 1..101: mol_type = other DNA
gcgccaagcggtgtgttttagagctaccgcggacggtaagcacggaatattttttttcagccaactccaatttttttttattccgtgcttaccgtccgcgg

SEQ ID NO: 1997 - DNA, 101 bp, synthetic construct
  source 1..101: mol_type = other DNA
gctttcacggaagggttttagagctacctatagtcacgaatcgtagggtttttttttcagccaactccaattttttttaccctacgattcgtgactatagg

SEQ ID NO: 1998 - DNA, 102 bp, synthetic construct
  source 1..102: mol_type = other DNA
gctgcgcatcgggtggttttagagctacctatagtcacgaatcgtagggtttttttttcagccaactccaattttttttaccctacgattcgtgactatagg

SEQ ID NO: 1999 - DNA, 102 bp, synthetic construct
  source 1..102: mol_type = other DNA
gccgcacttccgcgagttttagagctacctatagtcacgaatcgtagggtttttttttcagccaactccaattttttttaccctacgattcgtgactatagg

SEQ ID NO: 2000 - DNA, 101 bp, synthetic construct
  source 1..101: mol_type = other DNA
gcgccaagcggtgtgttttagagctacctatagtcacgaatcgtagggtttttttttcagccaactccaattttttttaccctacgattcgtgactatagg

SEQ ID NO: 2001 - DNA, 101 bp, synthetic construct
  source 1..101: mol_type = other DNA
gctttcacggaagggttttagagctacccgtcgtcacgtatgcgtagcattttttttcagccaactccaatttttttttgctacgcatacgtgacgacggg

SEQ ID NO: 2002 - DNA, 102 bp, synthetic construct
  source 1..102: mol_type = other DNA
gctgcgcatcgggtggttttagagctacccgtcgtcacgtatgcgtagcattttttttcagccaactccaatttttttttgctacgcatacgtgacgacggg

SEQ ID NO: 2003 - DNA, 102 bp, synthetic construct
  source 1..102: mol_type = other DNA
gccgcacttccgcgagttttagagctacccgtcgtcacgtatgcgtagcattttttttcagccaactccaatttttttttgctacgcatacgtgacgacggg

SEQ ID NO: 2004 - DNA, 101 bp, synthetic construct
  source 1..101: mol_type = other DNA
gcgccaagcggtgtgttttagagctacccgtcgtcacgtatgcgtagcattttttttcagccaactccaatttttttttgctacgcatacgtgacgacggg

SEQ ID NO: 2005 - DNA, 101 bp, synthetic construct
  source 1..101: mol_type = other DNA
gctttcacggaagggttttagagctacccgagaggtagtagacgacgcattttttttcagccaactccaatttttttttgcgtcgtctactacctctcggg

SEQ ID NO: 2006 - DNA, 102 bp, synthetic construct
  source 1..102: mol_type = other DNA
gctgcgcatcgggtggttttagagctacccgagaggtagtagacgacgcattttttttcagccaactccaatttttttttgcgtcgtctactacctctcggg

SEQ ID NO: 2007 - DNA, 102 bp, synthetic construct
  source 1..102: mol_type = other DNA
gccgcacttccgcgagttttagagctacccgagaggtagtagacgacgcattttttttcagccaactccaatttttttttgcgtcgtctactacctctcggg

SEQ ID NO: 2008 - DNA, 101 bp, synthetic construct
  source 1..101: mol_type = other DNA
gcgccaagcggtgtgttttagagctacccgagaggtagtagacgacgcattttttttcagccaactccaatttttttttgcgtcgtctactacctctcggg

SEQ ID NO: 2009 - DNA, 101 bp, synthetic construct
  source 1..101: mol_type = other DNA
gctttcacggaagggttttagagctaccgacgtctacggacgggagctattttttttcagccaactccaatttttttttagctcccgtccgtagacgtcgg

SEQ ID NO: 2010 - DNA, 102 bp, synthetic construct
  source 1..102: mol_type = other DNA
gctgcgcatcgggtggttttagagctaccgacgtctacggacgggagctattttttttcagccaactccaatttttttttagctcccgtccgtagacgtcgg

SEQ ID NO: 2011 - DNA, 102 bp, synthetic construct
  source 1..102: mol_type = other DNA
gccgcacttccgcgagttttagagctaccgacgtctacggacgggagctattttttttcagccaactccaatttttttttagctcccgtccgtagacgtcgg

SEQ ID NO: 2012 - DNA, 101 bp, synthetic construct
  source 1..101: mol_type = other DNA
gcgccaagcggtgtgttttagagctaccgacgtctacggacgggagctattttttttcagccaactccaatttttttttagctcccgtccgtagacgtcgg

SEQ ID NO: 2013 - DNA, 101 bp, synthetic construct
  source 1..101: mol_type = other DNA
gctttcacggaagggttttagagctaccaaagctcattcgcgactgagcttttttttcagccaactccaattttttttgctcagtcgcgaatgagctttgg

SEQ ID NO: 2014 - DNA, 102 bp, synthetic construct
  source 1..102: mol_type = other DNA
gctgcgcatcgggtggttttagagctaccaaagctcattcgcgactgagcttttttttcagccaactccaattttttttgctcagtcgcgaatgagctttgg

SEQ ID NO: 2015 - DNA, 102 bp, synthetic construct
  source 1..102: mol_type = other DNA
gccgcacttccgcgagttttagagctaccaaagctcattcgcgactgagcttttttttcagccaactccaattttttttgctcagtcgcgaatgagctttgg

SEQ ID NO: 2016 - DNA, 101 bp, synthetic construct
  source 1..101: mol_type = other DNA
gcgccaagcggtgtgttttagagctaccaaagctcattcgcgactgagcttttttttcagccaactccaattttttttgctcagtcgcgaatgagctttgg

SEQ ID NO: 2017 - DNA, 101 bp, synthetic construct
  source 1..101: mol_type = other DNA
gctttcacggaagggttttagagctaccatggcacgatcgacacggaggttttttttcagccaactccaattttttttcctccgtgtcgatcgtgccatgg

SEQ ID NO: 2018 - DNA, 102 bp, synthetic construct
  source 1..102: mol_type = other DNA
gctgcgcatcgggtggttttagagctaccatggcacgatcgacacggaggttttttttcagccaactccaattttttttcctccgtgtcgatcgtgccatgg

SEQ ID NO: 2019 - DNA, 102 bp, synthetic construct
  source 1..102: mol_type = other DNA
gccgcacttccgcgagttttagagctaccatggcacgatcgacacggaggttttttttcagccaactccaattttttttcctccgtgtcgatcgtgccatgg

SEQ ID NO: 2020 - DNA, 101 bp, synthetic construct
  source 1..101: mol_type = other DNA
gcgccaagcggtgtgttttagagctaccatggcacgatcgacacggaggttttttttcagccaactccaattttttttcctccgtgtcgatcgtgccatgg

SEQ ID NO: 2021 - DNA, 101 bp, synthetic construct
  source 1..101: mol_type = other DNA
gctttcacggaagggttttagagctacccgaactctctatcgaacgagtttttttttcagccaactccaattttttttactcgttcgatagagagttcggg

SEQ ID NO: 2022 - DNA, 102 bp, synthetic construct
  source 1..102: mol_type = other DNA
gctgcgcatcgggtggttttagagctacccgaactctctatcgaacgagtttttttttcagccaactccaattttttttactcgttcgatagagagttcggg

SEQ ID NO: 2023 - DNA, 102 bp, synthetic construct
  source 1..102: mol_type = other DNA
gccgcacttccgcgagttttagagctacccgaactctctatcgaacgagtttttttttcagccaactccaattttttttactcgttcgatagagagttcggg

SEQ ID NO: 2024 - DNA, 101 bp, synthetic construct
  source 1..101: mol_type = other DNA
gcgccaagcggtgtgttttagagctacccgaactctctatcgaacgagtttttttttcagccaactccaattttttttactcgttcgatagagagttcggg

SEQ ID NO: 2025 - skipped

SEQ ID NO: 2026 - DNA, 29 bp, synthetic construct
  source 1..29: mol_type = other DNA
ttttttttcagccaactccaatttttttt

SEQ ID NO: 2027 - DNA, 12 bp, synthetic construct
  source 1..12: mol_type = other DNA
gttttagagcta

SEQ ID NO: 2028-2029 - skipped (2 entries)

SEQ ID NO: 2030 - DNA, 14 bp, synthetic construct
  source 1..14: mol_type = other DNA
gaactgctaaatat

SEQ ID NO: 2031 - DNA, 14 bp, synthetic construct
  source 1..14: mol_type = other DNA
caattcctccacac

SEQ ID NO: 2032 - DNA, 14 bp, synthetic construct
  source 1..14: mol_type = other DNA
tcaagtgtcactaa

SEQ ID NO: 2033 - DNA, 14 bp, synthetic construct
  source 1..14: mol_type = other DNA
accataaatatcct

SEQ ID NO: 2034 - DNA, 14 bp, synthetic construct
  source 1..14: mol_type = other DNA
cgagccgtaccaga

SEQ ID NO: 2035 - DNA, 14 bp, synthetic construct
  source 1..14: mol_type = other DNA
ccaaggcttaaggg

SEQ ID NO: 2036 - DNA, 14 bp, synthetic construct
  source 1..14: mol_type = other DNA
gccgactggaagaa

SEQ ID NO: 2037 - DNA, 14 bp, synthetic construct
  source 1..14: mol_type = other DNA
ctgcaaacagtgat

SEQ ID NO: 2038 - DNA, 14 bp, synthetic construct
  source 1..14: mol_type = other DNA
cggtagttggaagt

SEQ ID NO: 2039 - DNA, 14 bp, synthetic construct
  source 1..14: mol_type = other DNA
cagcgccccgcggt

SEQ ID NO: 2040 - DNA, 14 bp, synthetic construct
  source 1..14: mol_type = other DNA
cgcagtgacgtggg

SEQ ID NO: 2041 - DNA, 14 bp, synthetic construct
  source 1..14: mol_type = other DNA
ctgccccgggtctg

SEQ ID NO: 2042 - DNA, 14 bp, synthetic construct
  source 1..14: mol_type = other DNA
gattgggttcgctg

SEQ ID NO: 2043 - DNA, 14 bp, synthetic construct
  source 1..14: mol_type = other DNA
cctccgctgggcgc

SEQ ID NO: 2044 - DNA, 14 bp, synthetic construct
  source 1..14: mol_type = other DNA
gcaactcggcccta

SEQ ID NO: 2045 - DNA, 14 bp, synthetic construct
  source 1..14: mol_type = other DNA
gggatgaggaccac

SEQ ID NO: 2046 - DNA, 14 bp, synthetic construct
  source 1..14: mol_type = other DNA
gcgctgtttgttta

SEQ ID NO: 2047 - DNA, 14 bp, synthetic construct
  source 1..14: mol_type = other DNA
ccgcacccatccag

SEQ ID NO: 2048 - DNA, 14 bp, synthetic construct
  source 1..14: mol_type = other DNA
gcgagtccacccgg

SEQ ID NO: 2049 - DNA, 14 bp, synthetic construct
  source 1..14: mol_type = other DNA
gagcagctgggcgc

SEQ ID NO: 2050 - DNA, 14 bp, synthetic construct
  source 1..14: mol_type = other DNA
agaccttagagacc

SEQ ID NO: 2051 - DNA, 14 bp, synthetic construct
  source 1..14: mol_type = other DNA
gctacgtaatttca

SEQ ID NO: 2052 - DNA, 14 bp, synthetic construct
  source 1..14: mol_type = other DNA
ttgaaagtagaagg

SEQ ID NO: 2053 - DNA, 14 bp, synthetic construct
  source 1..14: mol_type = other DNA
ttcttacaagtctt

SEQ ID NO: 2054 - DNA, 14 bp, synthetic construct
  source 1..14: mol_type = other DNA
atgggccaggcggc

SEQ ID NO: 2055 - DNA, 14 bp, synthetic construct
  source 1..14: mol_type = other DNA
acccgctggtcctg

SEQ ID NO: 2056 - DNA, 14 bp, synthetic construct
  source 1..14: mol_type = other DNA
tcgtgaagcatgtg

SEQ ID NO: 2057 - DNA, 14 bp, synthetic construct
  source 1..14: mol_type = other DNA
cagcaccagggaaa

SEQ ID NO: 2058 - DNA, 14 bp, synthetic construct
  source 1..14: mol_type = other DNA
cgccgagcggtcag

SEQ ID NO: 2059 - DNA, 14 bp, synthetic construct
  source 1..14: mol_type = other DNA
gtgcaccacggcgt

SEQ ID NO: 2060 - DNA, 14 bp, synthetic construct
  source 1..14: mol_type = other DNA
cgatggagctgagt

SEQ ID NO: 2061 - DNA, 14 bp, synthetic construct
  source 1..14: mol_type = other DNA
agcgccgcgcccat

SEQ ID NO: 2062 - DNA, 14 bp, synthetic construct
  source 1..14: mol_type = other DNA
aaggggcactgtaa

SEQ ID NO: 2063 - DNA, 14 bp, synthetic construct
  source 1..14: mol_type = other DNA
gcaaaggcccagtc

SEQ ID NO: 2064 - DNA, 14 bp, synthetic construct
  source 1..14: mol_type = other DNA
cacggccccgccac

SEQ ID NO: 2065 - DNA, 14 bp, synthetic construct
  source 1..14: mol_type = other DNA
gaacgcagctactg

SEQ ID NO: 2066 - DNA, 14 bp, synthetic construct
  source 1..14: mol_type = other DNA
acccggctctataa

SEQ ID NO: 2067 - DNA, 14 bp, synthetic construct
  source 1..14: mol_type = other DNA
ctccgattggcccg

SEQ ID NO: 2068 - DNA, 14 bp, synthetic construct
  source 1..14: mol_type = other DNA
gcagtgccccgtga

SEQ ID NO: 2069 - DNA, 14 bp, synthetic construct
  source 1..14: mol_type = other DNA
aggagattgacagc

SEQ ID NO: 2070 - DNA, 14 bp, synthetic construct
  source 1..14: mol_type = other DNA
cgtgcgcaggcgtc

SEQ ID NO: 2071 - DNA, 14 bp, synthetic construct
  source 1..14: mol_type = other DNA
tagcatcactaact

SEQ ID NO: 2072 - DNA, 14 bp, synthetic construct
  source 1..14: mol_type = other DNA
gcggagtctctaac

SEQ ID NO: 2073 - DNA, 14 bp, synthetic construct
  source 1..14: mol_type = other DNA
gacgagcaaggcgt

SEQ ID NO: 2074 - DNA, 14 bp, synthetic construct
  source 1..14: mol_type = other DNA
ctcgagggcgggct

SEQ ID NO: 2075 - DNA, 14 bp, synthetic construct
  source 1..14: mol_type = other DNA
gccaatcagcgccg

SEQ ID NO: 2076 - DNA, 14 bp, synthetic construct
  source 1..14: mol_type = other DNA
tggattccggacaa

SEQ ID NO: 2077 - DNA, 14 bp, synthetic construct
  source 1..14: mol_type = other DNA
gtgtggctctggtc

SEQ ID NO: 2078 - DNA, 14 bp, synthetic construct
  source 1..14: mol_type = other DNA
gatcgctcgggcaa

SEQ ID NO: 2079 - DNA, 14 bp, synthetic construct
  source 1..14: mol_type = other DNA
gacccgcccacacg

SEQ ID NO: 2080 - DNA, 14 bp, synthetic construct
  source 1..14: mol_type = other DNA
aacctggggaggcg

SEQ ID NO: 2081 - DNA, 14 bp, synthetic construct
  source 1..14: mol_type = other DNA
gttggctgggagcg

SEQ ID NO: 2082 - DNA, 14 bp, synthetic construct
  source 1..14: mol_type = other DNA
tacggtctccggcg

SEQ ID NO: 2083 - DNA, 14 bp, synthetic construct
  source 1..14: mol_type = other DNA
gcctcccgcgtgga

SEQ ID NO: 2084 - DNA, 14 bp, synthetic construct
  source 1..14: mol_type = other DNA
cagcgggggatacg

SEQ ID NO: 2085 - DNA, 14 bp, synthetic construct
  source 1..14: mol_type = other DNA
ccccccgtggccgg

SEQ ID NO: 2086 - DNA, 14 bp, synthetic construct
  source 1..14: mol_type = other DNA
cggctaccgaaccg

SEQ ID NO: 2087 - DNA, 14 bp, synthetic construct
  source 1..14: mol_type = other DNA
cgccgcgacctagg

SEQ ID NO: 2088 - DNA, 14 bp, synthetic construct
  source 1..14: mol_type = other DNA
gcgctggatggcca

SEQ ID NO: 2089 - DNA, 14 bp, synthetic construct
  source 1..14: mol_type = other DNA
gccgctgcaatccc

SEQ ID NO: 2090 - DNA, 14 bp, synthetic construct
  source 1..14: mol_type = other DNA
ctggccgcactaag

SEQ ID NO: 2091 - DNA, 14 bp, synthetic construct
  source 1..14: mol_type = other DNA
gtgctccccaaaat

SEQ ID NO: 2092 - DNA, 14 bp, synthetic construct
  source 1..14: mol_type = other DNA
gcactgatctcaga

SEQ ID NO: 2093 - DNA, 14 bp, synthetic construct
  source 1..14: mol_type = other DNA
cacgtggggccccg

SEQ ID NO: 2094 - DNA, 14 bp, synthetic construct
  source 1..14: mol_type = other DNA
ctggcacgcgccta

SEQ ID NO: 2095 - DNA, 14 bp, synthetic construct
  source 1..14: mol_type = other DNA
gcgcgggtacgcag

SEQ ID NO: 2096 - DNA, 14 bp, synthetic construct
  source 1..14: mol_type = other DNA
tgccggcggcgagg

SEQ ID NO: 2097 - DNA, 14 bp, synthetic construct
  source 1..14: mol_type = other DNA
caggagctcccaaa

SEQ ID NO: 2098 - DNA, 14 bp, synthetic construct
  source 1..14: mol_type = other DNA
cccacctttatctt

SEQ ID NO: 2099 - DNA, 14 bp, synthetic construct
  source 1..14: mol_type = other DNA
ggggcgcatctgat

SEQ ID NO: 2100 - DNA, 14 bp, synthetic construct
  source 1..14: mol_type = other DNA
cagggggaaacgca

SEQ ID NO: 2101 - DNA, 14 bp, synthetic construct
  source 1..14: mol_type = other DNA
gcctctgtggaccg

SEQ ID NO: 2102 - DNA, 14 bp, synthetic construct
  source 1..14: mol_type = other DNA
ttaggcccacgccc

SEQ ID NO: 2103 - DNA, 14 bp, synthetic construct
  source 1..14: mol_type = other DNA
gtagccttgggcgc

SEQ ID NO: 2104 - DNA, 14 bp, synthetic construct
  source 1..14: mol_type = other DNA
gcgtcctctcccac

SEQ ID NO: 2105 - DNA, 14 bp, synthetic construct
  source 1..14: mol_type = other DNA
cccgcagtgtcact

SEQ ID NO: 2106 - DNA, 14 bp, synthetic construct
  source 1..14: mol_type = other DNA
caaacttacacact

SEQ ID NO: 2107 - DNA, 14 bp, synthetic construct
  source 1..14: mol_type = other DNA
aaagggcggacggt

SEQ ID NO: 2108 - DNA, 14 bp, synthetic construct
  source 1..14: mol_type = other DNA
attggacccgattt

SEQ ID NO: 2109 - DNA, 14 bp, synthetic construct
  source 1..14: mol_type = other DNA
gtggctctaaggtg

SEQ ID NO: 2110 - DNA, 14 bp, synthetic construct
  source 1..14: mol_type = other DNA
gtgcgtaaaagggc

SEQ ID NO: 2111 - DNA, 14 bp, synthetic construct
  source 1..14: mol_type = other DNA
ggcatgtgtatggt

SEQ ID NO: 2112 - DNA, 14 bp, synthetic construct
  source 1..14: mol_type = other DNA
gacaagatctaaag

SEQ ID NO: 2113 - DNA, 14 bp, synthetic construct
  source 1..14: mol_type = other DNA
ttgtataaatcgtg

SEQ ID NO: 2114 - DNA, 14 bp, synthetic construct
  source 1..14: mol_type = other DNA
gctttcacggaagg

SEQ ID NO: 2115 - DNA, 14 bp, synthetic construct
  source 1..14: mol_type = other DNA
ctgcgcatcgggtg

SEQ ID NO: 2116 - DNA, 14 bp, synthetic construct
  source 1..14: mol_type = other DNA
ccgcacttccgcga

SEQ ID NO: 2117 - DNA, 14 bp, synthetic construct
  source 1..14: mol_type = other DNA
gcgccaagcggtgt

SEQ ID NO: 2118-2119 - skipped (2 entries)

SEQ ID NO: 2120 - DNA, 23 bp, synthetic construct
  source 1..23: mol_type = other DNA
cctacactcgacatcggtagcta

SEQ ID NO: 2121 - DNA, 23 bp, synthetic construct
  source 1..23: mol_type = other DNA
ccctggcggaacgttcgagtaat

SEQ ID NO: 2122 - DNA, 23 bp, synthetic construct
  source 1..23: mol_type = other DNA
cctacacgatagtggtcgtgcgc

SEQ ID NO: 2123 - DNA, 23 bp, synthetic construct
  source 1..23: mol_type = other DNA
cccgaactctctatcgaacgagt

SEQ ID NO: 2124 - DNA, 23 bp, synthetic construct
  source 1..23: mol_type = other DNA
ccatggcacgatcgacacggagg

SEQ ID NO: 2125 - DNA, 23 bp, synthetic construct
  source 1..23: mol_type = other DNA
ccaaagctcattcgcgactgagc

SEQ ID NO: 2126 - DNA, 23 bp, synthetic construct
  source 1..23: mol_type = other DNA
ccgacgtctacggacgggagcta

SEQ ID NO: 2127 - DNA, 23 bp, synthetic construct
  source 1..23: mol_type = other DNA
cccgagaggtagtagacgacgca

SEQ ID NO: 2128 - DNA, 23 bp, synthetic construct
  source 1..23: mol_type = other DNA
cccgtcgtcacgtatgcgtagca

SEQ ID NO: 2129 - DNA, 23 bp, synthetic construct
  source 1..23: mol_type = other DNA
cctatagtcacgaatcgtagggt

SEQ ID NO: 2130 - DNA, 23 bp, synthetic construct
  source 1..23: mol_type = other DNA
ccgcggacggtaagcacggaata

SEQ ID NO: 2131 - DNA, 23 bp, synthetic construct
  source 1..23: mol_type = other DNA
cccttactcgcgatactctcgac

SEQ ID NO: 2132 - DNA, 23 bp, synthetic construct
  source 1..23: mol_type = other DNA
ccgatcaatgcggtctgcgtaac

SEQ ID NO: 2133 - DNA, 23 bp, synthetic construct
  source 1..23: mol_type = other DNA
cccgttatcgacgttcaaggaac

SEQ ID NO: 2134 - DNA, 23 bp, synthetic construct
  source 1..23: mol_type = other DNA
ccgatagtgctaaacgacgcttt

SEQ ID NO: 2135 - DNA, 23 bp, synthetic construct
  source 1..23: mol_type = other DNA
cctcgtactagtctcgcatgacc

SEQ ID NO: 2136 - DNA, 23 bp, synthetic construct
  source 1..23: mol_type = other DNA
ccatagcggtactatcggcatct

SEQ ID NO: 2137 - DNA, 23 bp, synthetic construct
  source 1..23: mol_type = other DNA
ccgctaggacgttcaacggagtc

SEQ ID NO: 2138 - DNA, 23 bp, synthetic construct
  source 1..23: mol_type = other DNA
ccgcatcgtattatctgcgaagc

SEQ ID NO: 2139 - DNA, 23 bp, synthetic construct
  source 1..23: mol_type = other DNA
cctggttatagcggacgcactgt

SEQ ID NO: 2140 - DNA, 24 bp, synthetic construct
  source 1..24: mol_type = other DNA
cctgaaggtaaagatcgggtcctc

SEQ ID NO: 2141 - DNA, 24 bp, synthetic construct
  source 1..24: mol_type = other DNA
ccttcccgacttccgtaggagcgc

SEQ ID NO: 2142 - DNA, 24 bp, synthetic construct
  source 1..24: mol_type = other DNA
ccgtcgttgtaccgtctacttgac

SEQ ID NO: 2143 - DNA, 23 bp, synthetic construct
  source 1..23: mol_type = other DNA
tagctaccgatgtcgagtgtagg

SEQ ID NO: 2144 - DNA, 23 bp, synthetic construct
  source 1..23: mol_type = other DNA
attactcgaacgttccgccaggg

SEQ ID NO: 2145 - DNA, 23 bp, synthetic construct
  source 1..23: mol_type = other DNA
gcgcacgaccactatcgtgtagg

SEQ ID NO: 2146 - DNA, 23 bp, synthetic construct
  source 1..23: mol_type = other DNA
actcgttcgatagagagttcggg

SEQ ID NO: 2147 - DNA, 23 bp, synthetic construct
  source 1..23: mol_type = other DNA
cctccgtgtcgatcgtgccatgg

SEQ ID NO: 2148 - DNA, 23 bp, synthetic construct
  source 1..23: mol_type = other DNA
gctcagtcgcgaatgagctttgg

SEQ ID NO: 2149 - DNA, 23 bp, synthetic construct
  source 1..23: mol_type = other DNA
tagctcccgtccgtagacgtcgg

SEQ ID NO: 2150 - DNA, 23 bp, synthetic construct
  source 1..23: mol_type = other DNA
tgcgtcgtctactacctctcggg

SEQ ID NO: 2151 - DNA, 23 bp, synthetic construct
  source 1..23: mol_type = other DNA
tgctacgcatacgtgacgacggg

SEQ ID NO: 2152 - DNA, 23 bp, synthetic construct
  source 1..23: mol_type = other DNA
accctacgattcgtgactatagg

SEQ ID NO: 2153 - DNA, 23 bp, synthetic construct
  source 1..23: mol_type = other DNA
tattccgtgcttaccgtccgcgg

SEQ ID NO: 2154 - DNA, 23 bp, synthetic construct
  source 1..23: mol_type = other DNA
gtcgagagtatcgcgagtaaggg

SEQ ID NO: 2155 - DNA, 23 bp, synthetic construct
  source 1..23: mol_type = other DNA
gttacgcagaccgcattgatcgg

SEQ ID NO: 2156 - DNA, 23 bp, synthetic construct
  source 1..23: mol_type = other DNA
gttccttgaacgtcgataacggg

SEQ ID NO: 2157 - DNA, 23 bp, synthetic construct
  source 1..23: mol_type = other DNA
aaagcgtcgtttagcactatcgg

SEQ ID NO: 2158 - DNA, 23 bp, synthetic construct
  source 1..23: mol_type = other DNA
ggtcatgcgagactagtacgagg

SEQ ID NO: 2159 - DNA, 23 bp, synthetic construct
  source 1..23: mol_type = other DNA
agatgccgatagtaccgctatgg

SEQ ID NO: 2160 - DNA, 23 bp, synthetic construct
  source 1..23: mol_type = other DNA
gactccgttgaacgtcctagcgg

SEQ ID NO: 2161 - DNA, 23 bp, synthetic construct
  source 1..23: mol_type = other DNA
gcttcgcagataatacgatgcgg

SEQ ID NO: 2162 - DNA, 23 bp, synthetic construct
  source 1..23: mol_type = other DNA
acagtgcgtccgctataaccagg

SEQ ID NO: 2163 - DNA, 24 bp, synthetic construct
  source 1..24: mol_type = other DNA
gaggacccgatctttaccttcagg

SEQ ID NO: 2164 - DNA, 24 bp, synthetic construct
  source 1..24: mol_type = other DNA
gcgctcctacggaagtcgggaagg

SEQ ID NO: 2165 - DNA, 24 bp, synthetic construct
  source 1..24: mol_type = other DNA
gtcaagtagacggtacaacgacgg

SEQ ID NO: 2166 - DNA, 10 bp, synthetic construct
  source 1..10: mol_type = other DNA
tttttttttt

SEQ ID NO: 2167 - DNA, 15 bp, synthetic construct
  source 1..15: mol_type = other DNA
  misc_difference 1..15: note = This sequence may encompass 5-15 nucleotides
ttttttttttttttt

1.-16. (canceled)

17. A method for conversion of a plurality of stem cells into a plurality of pancreatic lineage cells, via modulation of expression levels of a plurality of distinct target genes comprising a first target gene and a second target gene, the method comprising:
a) contacting a first polynucleotide sequence in the plurality of stem cells by a first heterologous gene regulating moiety to modulate expression level of the first target gene that is operatively coupled to the first polynucleotide sequence, wherein the first target gene comprises one or more members selected from the group consisting of a forkhead box (FOX), a SRY-related HMG-box (SOX), a GATA, a basic helix-loop-helix transcription factor (bHLH), a homeobox, and a Maf transcription factor; and
b) contacting a second polynucleotide sequence in the plurality of stem cells by a second heterologous gene regulating moiety, to reduce expression level of the second target gene that is operatively coupled to the second polynucleotide sequence, wherein the second target gene comprises one or more members selected from the group consisting of an additional SOX, an additional homeobox, and a ETS transcription factor.

18. The method of claim 17, wherein (b) is performed prior to (a), to effect modulation of the first target gene and reduced expression level of the second target gene, respectively, in a sequential manner.

19. The method of claim 17, wherein (b) is performed subsequent to (a), to effect reduced expression of the second target gene and modulation of the first target gene, respectively, in a sequential manner.

20. The method of claim 17, wherein (a) and (b) are performed simultaneously.

21. The method of claim 17, wherein the additional SOX is not a member from SOX9 and SOX17.

22. The method of claim 17, wherein the additional SOX comprises SOX2.

23. The method of claim 17, wherein the additional homeobox is not a member from PDX1, NKX6-1, NKX2-2, PAX6, ONECUT1, and ISL1.

24. The method of claim 17, wherein the additional homeobox comprises CDX1, CDX2, or CDX4.

25. The method of claim 24, wherein the additional homeobox comprises CDX2.

26. The method of claim 17, wherein the additional homeobox comprises LMX1A or LMX1B.

27. (canceled)

28. The method of claim 17, wherein the ETS transcription factor comprises ERG, FLI1, or FEV.

29. The method of claim 28, wherein the ETS transcription factor comprises FEV.

30. The method of claim 17, the first target gene comprises two or more members selected from the group consisting of the FOX, the SOX, the GATA, the bHLH, the homeobox, and the Maf transcription factor.

31. The method of claim 17, the first target gene comprises one or more members selected from the group consisting of the FOX, the SOX, and the GATA.

32. The method of claim 17, wherein the first target gene comprises one or more members selected from the group consisting of the bHLH, the homeobox, and the Maf transcription factor.

33. The method of claim 17, wherein (i) the first polynucleotide sequence is upstream to or encodes the first target gene or (ii) the second polynucleotide sequence is upstream to or encodes the second target gene.

34. The method of claim 17, wherein the expression level of the first target gene is enhanced upon the contacting by the first heterologous gene regulating moiety.

35. The method of claim 17, wherein the method comprises contacting the plurality of stem cells with a heterologous genetic circuit comprising a plurality of gate units, wherein the heterologous genetic circuit is activatable to induce the plurality of gate units to modulate expression levels of the plurality of distinct target genes in a sequential manner to effect the conversion, and wherein the plurality of gate units comprises:
(i) a first gate unit that is preconfigured to effect the first heterologous gene regulating moiety to modulate the expression level of the first target gene; and
(ii) a second gate unit that is preconfigured to effect the second heterologous gene regulating moiety to reduce the expression level of the second target gene
wherein, upon activation of the heterologous genetic circuit, the plurality of gate units operates to effect the conversion.

36. The method of claim 35, wherein (i) the first gate unit is activatable to express the first heterologous gene regulating moiety or (ii) the second gate unit is activatable to express the second heterologous gene regulating moiety.

37.-114. (canceled)

115. A system for conversion of a plurality of stem cells into a plurality of pancreatic lineage cells, via modulation of expression levels of a plurality of distinct target genes comprising a first target gene and a second target gene, the system comprising:
a. a first heterologous gene regulating moiety configured to bind a first polynucleotide sequence in the plurality of stem cells to modulate expression level of the first target gene that is operatively coupled to the first polynucleotide sequence, wherein the first target gene comprises one or more members selected from the group consisting of a forkhead box (FOX), a SRY-related HMG-box (SOX), a GATA, a basic helix-loop-helix transcription factor (bHLH), a homeobox, and a Maf transcription factor; and
b. a second heterologous gene regulating moiety configured to bind a second polynucleotide sequence in the plurality of stem cells to reduce expression level of the second target gene that is operatively coupled to the second polynucleotide sequence, wherein the second target gene comprises one or more members selected from the group consisting of an additional SOX, an additional homeobox, and a EST transcription factor.

116.-117. (canceled)
